(19) United States
(12) Patent Application Publication
(10) Pub. No.: US 2024/0376448 A1
(43) Pub. Date: Nov. 14, 2024

(54) ENGINEERED RNA POLYMERASE VARIANTS

(71) Applicant: Codexis, Inc., Redwood City, CA (US)

(72) Inventors: Jacob Hansen Artz, Black Hawk, CO (US); Martha Camacho Hernandez, Houston, TX (US); Jason Fell, Martinez, CA (US); Mathew G. Miller, San Carlos, CA (US); Jovana Nazor, Milpitas, CA (US); James D. Nguyen, Winnetka, CA (US); Anand Patel, San Ramon, CA (US); Zhe Rui, Newark, CA (US); Jenna Tawil Abyad, River Vale, NJ (US); Hugo Juhn, Bronx, NY (US); Jason Arnold Lotvin, West Nyack, NY (US); Qi Liu, Scarsdale, NY (US); Joanna Sztuba-Solinska, Orangeburg, NY (US)

(21) Appl. No.: 18/661,523

(22) Filed: May 10, 2024

Related U.S. Application Data
(60) Provisional application No. 63/502,017, filed on May 12, 2023.

(51) Int. Cl. C12N 9/12; C12N 15/63

(52) U.S. Cl. CPC C12N 9/1247; C12N 15/63; C12Y 207/07006

(57) ABSTRACT

The present disclosure relates to engineered RNA polymerase polypeptides and compositions thereof, as well as polynucleotides encoding the engineered RNA polymerase polypeptides. The present disclosure also provides methods of using the engineered RNA polymerase polypeptides or compositions thereof for producing RNA.

### CROSS-REFERENCE TO RELATED APPLICATIONS

[0001] This application claims the benefit of U.S. Provisional Application No. 63/502,017, filed May 12, 2023, which is incorporated by reference herein.

### REFERENCE TO SEQUENCE LISTING, TABLE OR COMPUTER PROGRAM

[0002] The Sequence Listing concurrently submitted herewith as file name CX9-243US1_ST26.xml, created on May 10, 2024, with a file size of 2,511,974 bytes, is part of the specification and is incorporated by reference herein.

### TECHNICAL FIELD

[0003] The present disclosure relates to engineered RNA polymerase variants, compositions thereof, and methods of using the engineered RNA polymerase variants.

### BACKGROUND

[0004] RNA polymerases transcribe a DNA, and in some instances RNA, into RNA transcripts. These enzymes represent the primary machinery that drives transcription. RNA polymerases have been isolated and purified sufficiently that they are useful for producing RNA in vitro. In vitro transcription allows for polynucleotide template directed synthesis of RNA molecules of any sequence, ranging in size from short oligonucleotides to several kilobases. Typically, in vitro transcription involves engineering of a template that includes a promoter sequence upstream of the sequence of interest followed by transcription using the corresponding RNA polymerase. RNA transcripts can be further modified by, among others, capping, splicing, and/or addition of a poly-A tail. Some modifications, such as capping and addition of a poly-A tail, can occur as part of the transcription reaction, for example, by co-transcriptional capping by the RNA polymerase and by inclusion of appropriate poly-dT sequences in the polynucleotide template. In other instances, the capping and addition of the poly-A tail can be done post-transcriptionally, for example by use of an RNA capping enzyme (e.g., Faustovirus or Vaccinia virus capping enzyme) and poly-A tailing with a poly(A) polymerase (e.g., E. coli. poly(A) polymerase). In vitro generated transcripts are used in analytical techniques (e.g., hybridization analysis), structural studies (e.g., NMR and X ray crystallography), in biochemical and genetic studies (e.g., as antisense reagents), as functional molecules (e.g., ribozymes and aptamers), and as therapeutic agents.

[0005] RNA has become the focus of therapeutic applications, including, among others mRNA based vaccines, cancer immunotherapeutic, genome engineering (e.g., CRISPR), and enzyme replacement supplementation therapies. Important to such applications is the availability of stable RNA polymerases that can produce RNA at high yield and with high fidelity, while having minimal amount of undesirable products, including, among others, incomplete transcripts, and double stranded RNA.

### SUMMARY

[0006] The present disclosure provides engineered RNA polymerase polypeptides and compositions thereof, as well as polynucleotides encoding the engineered RNA polymerase polypeptides, where the engineered RNA polymerases are engineered to have improved properties, such as increased activity, increased thermostability, increased processivity, and increased yield or integrity of RNA product. The present disclosure also provides methods of using the engineered RNA polymerase polypeptides and compositions thereof for nucleic acid synthesis and other purposes.

[0007] In one aspect, the present disclosure provides engineered RNA polymerases, or a functional fragment thereof, comprising an amino acid sequence having at least 70%, 75%, 80%, 81%, 82%, 83%, 84%, 85%, 86%, 87%, 88%, 89%, 90%, 91%, 92%, 93%, 94%, 95%, 96%, 97%, 98%, 99%, or more sequence identity to a reference sequence corresponding to residues 8 to 890 of SEQ ID NO: 2, 4, 32, 44, 156, 234, 238, 386, 394, 588, 604, 686, 692, 712, or 800, or to a reference sequence corresponding to SEQ ID NO: 2, 4, 32, 44, 156, 234, 238, 386, 394, 588, 604, 686, 692, 712, or 800, wherein the amino acid sequence comprises one or more substitutions relative to the reference sequence corresponding to residues 8 to 890 of SEQ ID NO: 2, 4, 32, 44, 156, 234, 238, 386, 394, 588, 604, 686, 692, 712, or 800, or relative to the reference sequence corresponding to SEQ ID NO: 2, 4, 32, 44, 156, 234, 238, 386, 394, 588, 604, 686, 692, 712, or 800.

[0008] In some embodiments, the engineered RNA polymerase comprises an amino acid sequence having at least 70%, 75%, 80%, 81%, 82%, 83%, 84%, 85%, 86%, 87%, 88%, 89%, 90%, 91%, 92%, 93%, 94%, 95%, 96%, 97%, 98%, 99%, or more sequence identity to the reference sequence corresponding to residues 8 to 890 of SEQ ID NO: 2, or to the reference sequence corresponding to SEQ ID NO: 2, wherein the amino acid sequence comprises one or more substitutions relative to the reference sequence corresponding to residues 8 to 890 of SEQ ID NO: 2, or relative to the reference sequence corresponding to SEQ ID NO: 2.

[0009] In some embodiments, the engineered RNA polymerase comprises an amino acid sequence having at least 70%, 75%, 80%, 81%, 82%, 83%, 84%, 85%, 86%, 87%, 88%, 89%, 90%, 91%, 92%, 93%, 94%, 95%, 96%, 97%, 98%, 99%, or more sequence identity to the reference sequence corresponding to residues 8 to 890 of SEQ ID NO: 4, 32, 44, 156, 234, 238, 386, 394, 588, 604, 686, 692, 712, or 800, or to the reference sequence corresponding to SEQ ID NO: 4, 32, 44, 156, 234, 238, 386, 394, 588, 604, 686, 692, 712, or 800, wherein the amino acid sequence comprises one or more substitutions relative to the reference sequence corresponding to residues 8 to 890 of SEQ ID NO: 2, or relative to the reference sequence corresponding to SEQ ID NO: 2.

[0010] In some embodiments, the engineered RNA polymerase comprises an amino acid sequence having at least 70%, 75%, 80%, 81%, 82%, 83%, 84%, 85%, 86%, 87%, 88%, 89%, 90%, 91%, 92%, 93%, 94%, 95%, 96%, 97%, 98%, 99% or more sequence identity to the sequence corresponding to residues 8 to 890 of an even numbered SEQ ID NO. of SEQ ID NOs: 4-828, or to the sequence corresponding to an even numbered SEQ ID NO. of SEQ ID NOs: 4-828, wherein the amino acid sequence comprises one or more substitutions relative to the reference sequence corresponding to residues 8 to 890 of SEQ ID NO: 2, or relative to the reference sequence corresponding to SEQ ID NO: 2.

[0011] In some embodiments, the amino acid sequence of the engineered RNA polymerase comprises at least a substitution at amino acid position 14, 15, 17, 19, 21, 32, 33, 38, 45, 52, 54, 55, 56, 56, 57, 60, 61, 62, 63, 67, 69, 72, 75, 78, 81, 82, 83, 84, 89, 93, 95, 100, 105, 111, 115, 122, 124, 127, 131, 133, 135, 137, 138, 139, 140, 141, 143, 150, 160, 161, 162, 164, 166, 168, 169, 170, 171, 172, 173, 179, 185, 187, 193, 196, 207, 212, 217, 218, 221, 227, 237, 239, 240, 245, 246, 250, 253, 254, 257, 261, 272, 274, 275, 311, 336, 340, 342, 351, 357, 367, 375, 379, 382, 388, 391, 392, 394, 397, 401, 402, 403, 404, 419, 424, 437, 440, 494, 510, 514, 517, 527, 529, 530, 531, 533, 536, 589, 594, 598, 607, 609, 615, 616, 617, 625, 629, 648, 650, 655, 659, 660, 663, 664, 666, 670, 672, 690, 693, 696, 718, 720, 721, 749, 759, 763, 773, 775, 779, 782, 782, 810, 854, 857, 867, 875, or 878, or combinations thereof, wherein the amino acid positions are relative to the reference sequence corresponding to residues 8 to 890 of SEQ ID NO: 2, or relative to the reference sequence corresponding to SEQ ID NO: 2.

[0012] In some embodiments, the amino acid sequence of the engineered RNA polymerase comprises at least a substitution at amino acid position 32, 38, 56, 138, 150, 170, 171, 173, 246, 311, 336, 340, 357, 388, 394, 401, 404, 437, 514, 536, 609, 629, 659, 660, 664, 779, or 782, or combinations thereof, wherein the amino acid positions are relative to the reference sequence corresponding to residues 8 to 890 of SEQ ID NO: 2, or relative to the reference sequence corresponding to SEQ ID NO: 2.

[0013] In some embodiments, the amino acid sequence of the engineered RNA polymerase comprises at least a substitution or substitution set at amino acid position(s) 401/404, 336, 138, 401/403/404, 336/510, 388, 340, 401/402/404, or 351/357, wherein the amino acid positions are relative to the reference sequence corresponding to residues 8 to 890 of SEQ ID NO: 2, or relative to the reference sequence corresponding to SEQ ID NO: 2.

[0014] In some embodiments, the amino acid sequence of the engineered RNA polymerase comprises at least a substitution as set forth in Tables 5.1, 6.1, 7.1, 8.1, 9.1, 10.1, 11.1, 12.1, 13.1, 14.1, 15.1, 16.1, 17.1, 18.1, 19.1, 23.1, and 24.1, wherein the amino acid positions are relative to the reference sequence corresponding to residues 8 to 890 of SEQ ID NO: 2, or relative to the reference sequence corresponding to SEQ ID NO: 2.

[0015] In some embodiments, the amino acid sequence of the engineered RNA polymerase comprises at least a substitution or substitution set of an engineered RNA polymerase set forth in Tables 5.1, 6.1, 7.1, 8.1, 9.1, 10.1, 11.1, 12.1, 13.1, 14.1, 15.1, 16.1, 17.1, 18.1, 19.1, 23.1, and 24.1, wherein the amino acid positions are relative to the reference sequence corresponding to residues 8 to 890 of SEQ ID NO: 2, or relative to the reference sequence corresponding to SEQ ID NO: 2.

[0016] In some embodiments, the engineered RNA polymerase comprises an amino acid sequence having at least 70%, 75%, 80%, 81%, 82%, 83%, 84%, 85%, 86%, 87%, 88%, 89%, 90%, 91%, 92%, 93%, 94%, 95%, 96%, 97%, 98%, 99%, or more sequence identity to a reference sequence comprising at least a substitution or substitution set as set forth in Tables 5.1, 6.1, 7.1, 8.1, 9.1, 10.1, 11.1, 12.1, 14.1, 15.1, 16.1, 17.1, 18.1, 19.1, 23.1, and 24.1, wherein the amino acid positions are relative to the reference sequence corresponding to residues 8 to 890 of SEQ ID NO: 2, or relative to the reference sequence corresponding to SEQ ID NO: 2.

[0017] In some embodiments, the engineered RNA polymerase comprises an amino acid sequence having at least 70%, 75%, 80%, 81%, 82%, 83%, 84%, 85%, 86%, 87%, 88%, 89%, 90%, 91%, 92%, 93%, 94%, 95%, 96%, 97%, 98%, 99%, or more sequence identity to the reference sequence corresponding to residues 8 to 890 of SEQ ID NO: 4, 32, 44, 156, 234, 238, 386, 394, 588, 604, 686, 692, 712, or 800, or to the reference sequence corresponding to SEQ ID NO: 4, 32, 44, 156, 234, 238, 386, 394, 588, 604, 686, 692, 712, or 800.

[0018] In some embodiments, the engineered RNA polymerase comprises an amino acid sequence having at least 70%, 75%, 80%, 81%, 82%, 83%, 84%, 85%, 86%, 87%, 88%, 89%, 90%, 91%, 92%, 93%, 94%, 95%, 96%, 97%, 98%, 99% or more sequence identity to the reference sequence corresponding to residues 8 to 890 of an even numbered SEQ ID NO. of SEQ ID NOs: 4-828, or to the reference sequence corresponding to an even numbered SEQ ID NO. of SEQ ID NOs: 4-828.

[0019] In some embodiments, the engineered RNA polymerase comprises an amino acid sequence having at least 70%, 75%, 80%, 81%, 82%, 83%, 84%, 85%, 86%, 87%, 88%, 89%, 90%, 91%, 92%, 93%, 94%, 95%, 96%, 97%, 98%, 99%, or more sequence identity to the reference sequence corresponding to residues 8 to 890 of SEQ ID NO: 4, 32, 44, 156, 234, 238, 386, 394, 588, 604, 686, 692, 712, or 800, or to the reference sequence corresponding to SEQ ID NO: 4, 32, 44, 156, 234, 238, 386, 394, 588, 604, 686, 692, 712, or 800, wherein the amino acid sequence comprises one or more substitutions relative to the reference sequence corresponding to residues 8 to 890 of SEQ ID NO: 4, 32, 44, 156, 234, 238, 386, 394, 588, 604, 686, 692, 712, or 800, or relative to the reference sequence corresponding to SEQ ID NO: 4, 32, 44, 156, 234, 238, 386, 394, 588, 604, 686, 692, 712, or 800.

[0020] In some embodiments, the engineered RNA polymerase comprises an amino acid sequence having at least 70%, 75%, 80%, 81%, 82%, 83%, 84%, 85%, 86%, 87%, 88%, 89%, 90%, 91%, 92%, 93%, 94%, 95%, 96%, 97%, 98%, 99%, or more sequence identity to the reference sequence corresponding to residues 8 to 890 of an even-number SEQ ID NO. of SEQ ID NOs: 4-828, or to a reference sequence corresponding to an even-numbered SEQ ID NO. of SEQ ID NOs: 4-828, wherein the amino acid sequence comprises one or more substitutions relative to the reference sequence corresponding to residues 8 to 890 of SEQ ID NO: 4, 32, 44, 156, 234, 238, 386, 394, 588, 604, 686, 692, 712, or 800, or relative to the reference sequence corresponding to SEQ ID NO: 4, 32, 44, 156, 234, 238, 386, 394, 588, 604, 686, 692, 712, or 800.

[0021] In some embodiments, the amino acid sequence of the engineered RNA polymerase comprises at least a substitution at amino acid position 13, 14, 15, 17, 19, 21, 32, 33, 38, 45, 52, 54, 55, 56, 56, 57, 60, 61, 62, 63, 67, 69, 72, 75, 78, 81, 82, 83, 84, 89, 93, 95, 100, 105, 111, 115, 122, 124, 127, 131, 133, 135, 137, 138, 139, 140, 141, 143, 150, 160, 161, 162, 164, 166, 168, 169, 170, 171, 172, 173, 179, 185, 187, 193, 196, 207, 212, 217, 218, 221, 227, 237, 239, 240, 245, 246, 250, 253, 254, 257, 261, 272, 274, 275, 311, 336, 340, 342, 351, 357, 367, 375, 379, 382, 388, 391, 392, 394, 397, 401, 402, 403, 404, 419, 424, 437, 440, 494, 510, 514, 517, 527, 529, 530, 531, 533, 536, 589, 594, 598, 607, 609, 615, 616, 617, 625, 629, 648, 650, 655, 659, 660, 663, 664, 666, 670, 672, 690, 693, 696, 718, 720, 721, 749, 759, 763, 773, 775, 779, 782, 782, 810, 854, 857, 867, 875, or 878, or combinations thereof, or combinations thereof, wherein the amino acid positions are relative to the reference sequence corresponding to residues 8 to 890 of SEQ ID NO: 4, 32, 44, 156, 234, 238, 386, 394, 588, 604, 686, 692, 712, or 800, or relative to the reference sequence corresponding to SEQ ID NO: 4, 32, 44, 156, 234, 238, 386, 394, 588, 604, 686, 692, 712, or 800.

[0022] In some embodiments, the amino acid sequence of the engineered RNA polymerase comprises at least a substitution at amino acid position 32, 38, 56, 138, 150, 170, 171, 173, 246, 311, 336, 340, 357, 388, 394, 401, 404, 437, 514, 536, 609, 629, 659, 660, 664, 779, or 782, or combinations thereof, wherein the amino acid positions are relative to the reference sequence corresponding to residues 8 to 890 of SEQ ID NO: 4, 32, 44, 156, 234, 238, 386, 394, 588, 604, 686, 692, 712, or 800, or relative to the reference sequence corresponding to SEQ ID NO: 4, 32, 44, 156, 234, 238, 386, 394, 588, 604, 686, 692, 712, or 800.

[0023] In some embodiments, the engineered RNA polymerase comprises an amino acid sequence having at least 70%, 75%, 80%, 81%, 82%, 83%, 84%, 85%, 86%, 87%, 88%, 89%, 90%, 91%, 92%, 93%, 94%, 95%, 96%, 97%, 98%, 99%, or more sequence identity to the reference sequence corresponding to residues 8 to 890 of SEQ ID NO: 4, or to the reference sequence corresponding to SEQ ID NO: 4, wherein the amino acid sequence comprises one or more substitutions relative to the reference sequence corresponding to residues 8 to 890 of SEQ ID NO: 4, or relative to the reference sequence corresponding to SEQ ID NO: 4.

[0024] In some embodiments, the amino acid sequence of the engineered RNA polymerase comprises at least a substitution set at amino acid positions 311/388/404/440, 138/340, 138/311/336/340/388, 311/388/440, 138/311/340/388/404/440, 138/336/342, or 351/388, wherein the amino acid positions are relative to the reference sequence corresponding to residues 8 to 890 of SEQ ID NO: 4, or relative to the reference sequence corresponding to SEQ ID NO: 4.

[0025] In some embodiments, the engineered RNA polymerase comprises an amino acid sequence having at least 70%, 75%, 80%, 81%, 82%, 83%, 84%, 85%, 86%, 87%, 88%, 89%, 90%, 91%, 92%, 93%, 94%, 95%, 96%, 97%, 98%, 99%, or more sequence identity to the reference sequence corresponding to residues 8 to 890 of SEQ ID NO: 32, or to the reference sequence corresponding to SEQ ID NO: 32, wherein the amino acid sequence comprises one or more substitutions relative to the reference sequence corresponding to residues 8 to 890 of SEQ ID NO: 32, or relative to the reference sequence corresponding to SEQ ID NO: 32.

[0026] In some embodiments, the amino acid sequence of the engineered RNA polymerase comprises at least a substitution or substitution set at amino acid position(s) 514, 38/514, 38/394/514, 38/394/514/664, 394/514/875, 394/514, 38/124/394/514, 171/878, 170, 173, 172, 170/629, 171, 168, 166, 166/272/274/275, 169, 207, 168/217/218, 171/530, 382, 773, 670, 379, 392, 419, 57, 164, 810, 659, 54, 172/173/514/659/660, 170/171/172/514/659, 173/514/659/660, 173/514/659/810, 170/340/514/659/660/810, 170/171/173/336/340/514/659/660, 57/171/173/514/659/660/810, 170/173/514/659/660/810, 57/171/172/336/340/514/659, 173/514, 171/172/173/514/659/660, 57/170/171/173/514/659/660/810, 57/173/514, 172/173/514/857, 57/173/340/514, 170/171/173/336/514, 171/514, 57/170/173/336/514, 170/336, 173/514/659, 57/514, or 173/810, wherein the amino acid positions are relative to the reference sequence corresponding to residues 8 to 890 of SEQ ID NO: 32, or relative to the reference sequence corresponding to SEQ ID NO: 32.

[0027] In some embodiments, the engineered RNA polymerase comprises an amino acid sequence having at least 70%, 75%, 80%, 81%, 82%, 83%, 84%, 85%, 86%, 87%, 88%, 89%, 90%, 91%, 92%, 93%, 94%, 95%, 96%, 97%, 98%, 99%, or more sequence identity to the reference sequence corresponding to residues 8 to 890 of SEQ ID NO: 44, or to the reference sequence corresponding to SEQ ID NO: 44, wherein the amino acid sequence comprises one or more substitutions relative to the reference sequence corresponding to residues 8 to 890 of SEQ ID NO: 44, or relative to the reference sequence corresponding to SEQ ID NO: 44.

[0028] In some embodiments, the amino acid sequence of the engineered RNA polymerase comprises at least a substitution set at amino acid position(s) 336, 143/336/340/782 or 143/336/340/357/514, wherein the amino acid positions are relative to the reference sequence corresponding to residues 8 to 890 of SEQ ID NO: 44, or relative to the reference sequence corresponding to SEQ ID NO: 44.

[0029] In some embodiments, the engineered RNA polymerase comprises an amino acid sequence having at least 70%, 75%, 80%, 81%, 82%, 83%, 84%, 85%, 86%, 87%, 88%, 89%, 90%, 91%, 92%, 93%, 94%, 95%, 96%, 97%, 98%, 99%, or more sequence identity to the reference sequence corresponding to residues 8 to 890 of SEQ ID NO: 156, or to a reference sequence corresponding to SEQ ID NO: 156, wherein the amino acid sequence comprises one or more substitutions relative to the reference sequence corresponding to residues 8 to 890 of SEQ ID NO: 156, or relative to the reference sequence corresponding to SEQ ID NO: 156.

[0030] In some embodiments, the amino acid sequence of the engineered RNA polymerase comprises at least a substitution or substitution set at amino acid position(s) 207, 419, 207/336/340, 166/169, 207/670, 166/336/340, 207/419/670, 207/336/340/382/419/670, 207/382, 670, 336/670, 340/670, 382, 127/141/207/336/382/670, 207/336/382/419/670, 419/670, 166/168/207/336/340/419/670, 166/340, or 207/336/340/670, wherein the amino acid positions are relative to the reference sequence corresponding to residues 8 to 890 of SEQ ID NO: 156, or relative to the reference sequence corresponding to SEQ ID NO: 156.

[0031] In some embodiments, the amino acid sequence of the engineered RNA polymerase comprises at least a substitution or substitution set at amino acid position(s) 38/437/779, 38/437, 38, 38/207/437/779, 517/779, 38/437/527/664, 38/207/379/437, 664/670/779, 38/779, 38/437/517, 437/779, 38/437/607, 38/379/779, or 517/670/779, wherein the amino acid positions are relative to the reference sequence corresponding to residues 8 to 890 of SEQ ID NO: 156, or relative to the reference sequence corresponding to SEQ ID NO: 156.

[0032] In some embodiments, the amino acid sequence of the engineered RNA polymerase comprises at least a substitution set at amino acid positions 357/394/664 or 138/311/336/340/357/388/394/404/664, wherein the amino acid positions are relative to the reference sequence corresponding to residues 8 to 890 of SEQ ID NO: 156, or relative to the reference sequence corresponding to SEQ ID NO: 156.

[0033] In some embodiments, the engineered RNA polymerase comprises an amino acid sequence having at least 70%, 75%, 80%, 81%, 82%, 83%, 84%, 85%, 86%, 87%, 88%, 89%, 90%, 91%, 92%, 93%, 94%, 95%, 96%, 97%, 98%, 99%, or more sequence identity to the reference sequence corresponding to residues 8 to 890 of SEQ ID NO: 234, or to the reference sequence corresponding to SEQ ID NO: 234, wherein the amino acid sequence comprises one or more substitutions relative to the reference sequence corresponding to residues 8 to 890 of SEQ ID NO: 234, or relative to the reference sequence corresponding to SEQ ID NO: 234.

[0034] In some embodiments, the amino acid sequence of the engineered RNA polymerase comprises at least a substitution or substitution set at amino acid position(s) 720, 196, 609, 246, 185, 594, 212, 494, 375, 721, 72, 867, 160, 718, 187, 170/173, 615, 137/138, 854, 131, 38/185/187/437, 185/187, 437/609, 38/609, 38/185/187/437/609, 437/609/720, 185/187/609, 185/187/437, 437/721, 609/720, 185/187/246, or 185/187/437/609/720, wherein the amino acid positions are relative to the reference sequence corresponding to residues 8 to 890 of SEQ ID NO: 234, or relative to the reference sequence corresponding to SEQ ID NO: 234.

[0035] In some embodiments, the engineered RNA polymerase comprises an amino acid sequence having at least 70%, 75%, 80%, 81%, 82%, 83%, 84%, 85%, 86%, 87%, 88%, 89%, 90%, 91%, 92%, 93%, 94%, 95%, 96%, 97%, 98%, 99%, or more sequence identity to the reference sequence corresponding to residues 8 to 890 of SEQ ID NO: 386, or to the reference sequence corresponding to SEQ ID NO: 386, wherein the amino acid sequence comprises one or more substitutions relative to the reference sequence corresponding to residues 8 to 890 of SEQ ID NO: 386, or relative to the reference sequence corresponding to SEQ ID NO: 386.

[0036] In some embodiments, the amino acid sequence of the engineered RNA polymerase comprises at least a substitution or substitution set at amino acid position(s) 170/609, 38/185/187/609, 38/185/187, 38/170/173, 38/173/185/187/720, 170/185/187/609, 609, 170/185/187/609/721, 38/609, 38/170/246/609, 185/187/609/718, 38/185/187/609/718/720, 38/170/246/609/718, 720, 246/609, 38/185/187/246/720, 38/609/721, 38/721, 38/720/721, 38/170/609/718/720, 38/718, 38/185/187/609/718/721, 529/609, 38/609/718, 185/187/609/718/720, 185/187/609/718/721, 38/170/718/720/721, 170/185/187/718/720, 38/173/185/187/246/609/720, 609/718/720, 170/185/187/718/720/721, 38/170/173/246/609/718, 246/721, 38/718/720, or 38/609/718/720, wherein the amino acid positions are relative to the reference sequence corresponding to residues 8 to 890 of SEQ ID NO: 386, or relative to the reference sequence corresponding to SEQ ID NO: 386.

[0037] In some embodiments, the engineered RNA polymerase comprises an amino acid sequence having at least 70%, 75%, 80%, 81%, 82%, 83%, 84%, 85%, 86%, 87%, 88%, 89%, 90%, 91%, 92%, 93%, 94%, 95%, 96%, 97%, 98%, 99%, or more sequence identity to the reference sequence corresponding to residues 8 to 890 of SEQ ID NO: 238, or to the reference sequence corresponding to SEQ ID NO: 238, wherein the amino acid sequence comprises one or more substitutions relative to the reference sequence corresponding to residues 8 to 890 of SEQ ID NO: 238, or relative to the reference sequence corresponding to SEQ ID NO: 238.

[0038] In some embodiments, the amino acid sequence of the engineered RNA polymerase comprises at least a substitution or substitution set at amino acid position(s) 143, 105, 775/779, 135, 100, 246, 779/782, 749, 237, 162, 83, 218, 227, 115, 274, 81, 122, 61, 32, 139, 75, 239, 257, 240, 69/161, 253, 14, 221, 84, 133/150, 60, 275, 89, 15, 254, 625, 14/67, 21, 93, 250, 217, 19, 95, 759, 62, or 140, wherein the amino acid positions are relative to the reference sequence corresponding to residues 8 to 890 of SEQ ID NO: 238, or relative to the reference sequence corresponding to SEQ ID NO: 238.

[0039] In some embodiments, the engineered RNA polymerase comprises an amino acid sequence having at least 70%, 75%, 80%, 81%, 82%, 83%, 84%, 85%, 86%, 87%, 88%, 89%, 90%, 91%, 92%, 93%, 94%, 95%, 96%, 97%, 98%, 99%, or more sequence identity to the reference sequence corresponding to residues 8 to 890 of SEQ ID NO: 394, or to the reference sequence corresponding to SEQ ID NO: 394, wherein the amino acid sequence comprises one or more substitutions relative to the reference sequence corresponding to residues 8 to 890 of SEQ ID NO: 394, or relative to the reference sequence corresponding to SEQ ID NO: 394.

[0040] In some embodiments, the amino acid sequence of the engineered RNA polymerase comprises at least a substitution or substitution set at amino acid position(s) 609/779, 246/609, 246, 609/775/779, 105, 143/609/775, 105/135/609/775, or 111/609, 609, wherein the amino acid positions are relative to the reference sequence corresponding to residues 8 to 890 of SEQ ID NO: 394, or relative to the reference sequence corresponding to SEQ ID NO: 394.

[0041] In some embodiments, the engineered RNA polymerase comprises an amino acid sequence having at least 70%, 75%, 80%, 81%, 82%, 83%, 84%, 85%, 86%, 87%, 88%, 89%, 90%, 91%, 92%, 93%, 94%, 95%, 96%, 97%, 98%, 99%, or more sequence identity to the reference sequence corresponding to residues 8 to 890 of SEQ ID NO: 588, or to the reference sequence corresponding to SEQ ID NO: 588, wherein the amino acid sequence comprises one or more substitutions relative to the reference sequence corresponding to residues 8 to 890 of SEQ ID NO: 588, or relative to the reference sequence corresponding to SEQ ID NO: 588.

[0042] In some embodiments, the amino acid sequence of the engineered RNA polymerase comprises at least a substitution or substitution set at amino acid position(s) 32, 531/533, 115, 83, 32/60/61, 55, 589, 357, 617, 172, 598, 56/193, 56, 536, 52, 17, 261, 78, 629, 63, 82, 207, 666, 150, 45, 135, 13, 33, or 245, wherein the amino acid positions are relative to the reference sequence corresponding to residues 8 to 890 of SEQ ID NO: 588, or relative to the reference sequence corresponding to SEQ ID NO: 588.

[0043] In some embodiments, the engineered RNA polymerase comprises an amino acid sequence having at least 70%, 75%, 80%, 81%, 82%, 83%, 84%, 85%, 86%, 87%, 88%, 89%, 90%, 91%, 92%, 93%, 94%, 95%, 96%, 97%, 98%, 99%, or more sequence identity to the reference sequence corresponding to residues 8 to 890 of SEQ ID NO: 604, or to the reference sequence corresponding to SEQ ID NO: 604, wherein the amino acid sequence comprises one or more substitutions relative to the reference sequence corresponding to residues 8 to 890 of SEQ ID NO: 604, or relative to the reference sequence corresponding to SEQ ID NO: 604.

[0044] In some embodiments, the amino acid sequence of the engineered RNA polymerase comprises at least a substitution or substitution set at amino acid position(s) 207/245/629, 17/56/150/598, 56/629, 536, 185, 56/150, 17/56/150/207/245/598/617/629, 56/150/536/598, 56/536, 185/666, 150, or 143/150/246/782, wherein the amino acid positions are relative to the reference sequence corresponding to residues 8 to 890 of SEQ ID NO: 604, or relative to the reference sequence corresponding to SEQ ID NO: 604.

[0045] In some embodiments, the engineered RNA polymerase comprises an amino acid sequence having at least 70%, 75%, 80%, 81%, 82%, 83%, 84%, 85%, 86%, 87%, 88%, 89%, 90%, 91%, 92%, 93%, 94%, 95%, 96%, 97%, 98%, 99%, or more sequence identity to the reference sequence corresponding to residues 8 to 890 of SEQ ID NO: 686, or to the reference sequence corresponding to SEQ ID NO: 686, wherein the amino acid sequence comprises one or more substitutions relative to the reference sequence corresponding to residues 8 to 890 of SEQ ID NO: 686, or relative to the reference sequence corresponding to SEQ ID NO: 686.

[0046] In some embodiments, the amino acid sequence of the engineered RNA polymerase comprises at least a substitution or substitution set at amino acid position(s) 143, 246/424/648/782, 246/659/782, 56/150/629/660/782, 721/782, 782, 196/659/782, or 720/721/782, wherein the amino acid positions are relative to the reference sequence corresponding to residues 8 to 890 of SEQ ID NO: 686, or relative to the reference sequence corresponding to SEQ ID NO: 686.

[0047] In some embodiments, the engineered RNA polymerase comprises an amino acid sequence having at least 70%, 75%, 80%, 81%, 82%, 83%, 84%, 85%, 86%, 87%, 88%, 89%, 90%, 91%, 92%, 93%, 94%, 95%, 96%, 97%, 98%, 99%, or more sequence identity to the reference sequence corresponding to residues 8 to 890 of SEQ ID NO: 692, or to the reference sequence corresponding to SEQ ID NO: 692, wherein the amino acid sequence comprises one or more substitutions relative to the reference sequence corresponding to residues 8 to 890 of SEQ ID NO: 692, or relative to the reference sequence corresponding to SEQ ID NO: 692.

[0048] In some embodiments, the amino acid sequence of the engineered RNA polymerase comprises at least a substitution or substitution set at amino acid position(s) 143/659/782, 166/171/246/311, 143/721, 782, or 143/171/659/782, wherein the amino acid positions are relative to the reference sequence corresponding to residues 8 to 890 of SEQ ID NO: 692, or relative to the reference sequence corresponding to SEQ ID NO: 692.

[0049] In some embodiments, the engineered RNA polymerase comprises an amino acid sequence having at least 70%, 75%, 80%, 81%, 82%, 83%, 84%, 85%, 86%, 87%, 88%, 89%, 90%, 91%, 92%, 93%, 94%, 95%, 96%, 97%, 98%, 99%, or more sequence identity to the reference sequence corresponding to residues 8 to 890 of SEQ ID NO: 712, or to the reference sequence corresponding to SEQ ID NO: 712, wherein the amino acid sequence comprises one or more substitutions relative to the reference sequence corresponding to residues 8 to 890 of SEQ ID NO: 712, or relative to the reference sequence corresponding to SEQ ID NO: 712.

[0050] In some embodiments, the amino acid sequence of the engineered RNA polymerase comprises at least a substitution or substitution set at amino acid position(s) 367, 382, 670, 672, 357, 388, 693, 397, 375, 137/382/782, 655, 137/382/392, 391, 137/655/721/763, 696, 663, 137/382, 137/382/392/650/655/782, 137/382/629/660/672, 616, 690, 179, 137, 357/382/670, 388/670/672, 357/375, 357/672, 629, or 655/670, wherein the amino acid positions are relative to the reference sequence corresponding to residues 8 to 890 of SEQ ID NO: 712, or relative to the reference sequence corresponding to SEQ ID NO: 712.

[0051] In some embodiments, the engineered RNA polymerase comprises an amino acid sequence having at least 70%, 75%, 80%, 81%, 82%, 83%, 84%, 85%, 86%, 87%, 88%, 89%, 90%, 91%, 92%, 93%, 94%, 95%, 96%, 97%, 98%, 99%, or more sequence identity to the reference sequence corresponding to residues 8 to 890 of SEQ ID NO: 800, or to the reference sequence corresponding to SEQ ID NO: 800, wherein the amino acid sequence comprises one or more substitutions relative to the reference sequence corresponding to residues 8 to 890 of SEQ ID NO: 800, or relative to the reference sequence corresponding to SEQ ID NO: 800.

[0052] In some embodiments, the amino acid sequence of the engineered RNA polymerase comprises at least a substitution or substitution set at amino acid position(s) 137, 56/311/382, 56/137/143/721, 137/392, 56/137/392, 56/137/143/404/720, 56/143/246, 56/392, 392/404, 392, 56/137, or 56/196/392, wherein the amino acid positions are relative to the reference sequence corresponding to residues 8 to 890 of SEQ ID NO: 800, or relative to the reference sequence corresponding to SEQ ID NO: 800.

[0053] In some embodiments, the amino acid sequence of the engineered RNA polymerase comprises at least a substitution as set forth in Tables 5.1, 6.1, 7.1, 8.1, 9.1, 10.1, 11.1, 12.1, 13.1, 14.1, 15.1, 16.1, 17.1, 18.1, 19.1, 23.1, and 24.1, wherein the amino acid positions are relative to the reference sequence corresponding to residues 8 to 890 of SEQ ID NO: 2, 4, 32, 44, 156, 234, 238, 386, 394, 588, 604, 686, 692, 712, or 800, or relative to the reference sequence corresponding to SEQ ID NO: 2, 4, 32, 44, 156, 234, 238, 386, 394, 588, 604, 686, 692, 712, or 800.

[0054] In some embodiments, the amino acid sequence of the engineered RNA polymerase comprises at least a substitution or substitution set of an engineered RNA polymerase set forth in Tables 5.1, 6.1, 7.1, 8.1, 9.1, 10.1, 11.1, 12.1, 13.1, 14.1, 15.1, 16.1, 17.1, 18.1, 19.1, 23.1, and 24.1, wherein the amino acid positions are relative to the reference sequence corresponding to residues 8 to 890 of SEQ ID NO: 2, 4, 32, 44, 156, 234, 238, 386, 394, 588, 604, 686, 692, 712, or 800, or relative to the reference sequence corresponding to SEQ ID NO: 2, 4, 32, 44, 156, 234, 238, 386, 394, 588, 604, 686, 692, 712, or 800.

[0055] In some embodiments, the engineered RNA polymerase comprises an amino acid sequence having at least 70%, 75%, 80%, 81%, 82%, 83%, 84%, 85%, 86%, 87%, 88%, 89%, 90%, 91%, 92%, 93%, 94%, 95%, 96%, 97%, 98%, 99%, or more sequence identity to a reference sequence comprising a substitution or substitution set as set forth in Tables 5.1, 6.1, 7.1, 8.1, 9.1, 10.1, 11.1, 12.1, 13.1, 14.1, 15.1, 16.1, 17.1, 18.1, 19.1, 23.1, and 24.1, wherein the amino acid positions are relative to the reference sequence corresponding to residues 8 to 890 of SEQ ID NO: 2, 4, 32, 44, 156, 234, 238, 386, 394, 588, 604, 686, 692, 712, or 800, or relative to the reference sequence corresponding to SEQ ID NO: 2, 4, 32, 44, 156, 234, 238, 386, 394, 588, 604, 686, 692, 712, or 800.

[0056] In some embodiments, the engineered RNA polymerase comprises an amino acid sequence comprising residues 8 to 890 of an even numbered SEQ ID NO. of SEQ ID NOs: 4-828, or comprises an even numbered SEQ ID NO. of SEQ ID NOs: 4-828, optionally wherein the amino acid sequence has 1, 2, 3, 4, 5, 6, 7, 8, 9, or up to 10 substitutions.

[0057] In some embodiments, the engineered RNA polymerase comprises an amino acid sequence comprising residues 8 to 890 of SEQ ID NO: 4, 32, 44, 156, 234, 238, 386, 394, 588, 604, 686, 692, 712, or 800, or comprising SEQ ID NO: 4, 32, 44, 156, 234, 238, 386, 394, 588, 604, 686, 692, 712, or 800, optionally wherein the amino acid sequence has 1, 2, 3, 4, 5, 6, 7, 8, 9, or up to 10 substitutions.

[0058] In some embodiments, the engineered RNA polymerase is characterized by at least one improved property as compared to a reference RNA polymerase. In some embodiments, the improved property is selected from i) increased activity, ii) increased thermostability, iii) increased processivity, or iv) increased RNA product integrity, or any combination of i), ii), iii) and iv), as compared to a reference RNA polymerase, wherein the reference RNA polymerase has the sequence corresponding to residues 8 to 890 of SEQ ID NO: 2, 4, 32, 44, 156, 234, 238, 386, 394, 588, 604, 686, 692, 712, or 800, or the sequence corresponding to SEQ ID NO: 2, 4, 32, 44, 156, 234, 238, 386, 394, 588, 604, 686, 692, 712, or 800. In some embodiments, the reference RNA polymerase has the sequence corresponding to residues 8 to 890 of SEQ ID NO: 2, or the sequence corresponding to SEQ ID NO: 2.

[0059] In some further embodiments, the engineered RNA polymerase is purified. In some embodiments, the engineered RNA polymerase is provided in solution, as a lyophilizate, or is immobilized on a substrate or support medium, such as surfaces of solid substrates or membranes or particles.

[0060] In another aspect, the present disclosure provides recombinant polynucleotides encoding the engineered RNA polymerases disclosed herein.

[0061] In some embodiments, the recombinant polynucleotide comprises a polynucleotide sequence having at least 70%, 75%, 75%, 80%, 81%, 82%, 83%, 84%, 85%, 90%, 91%, 92%, 93%, 94%, 95%, 96%, 97%, 98%, 99%, or more sequence identity to a reference polynucleotide sequence corresponding to nucleotide residues 21 to 2670 of an odd-numbered SEQ ID NO. of SEQ ID NOs: 3-827, or to an odd-numbered SEQ ID NO. of SEQ ID NOs: 3-827, wherein the recombinant polynucleotide encodes an RNA polymerase.

[0062] In some embodiments, the recombinant polynucleotide comprises a polynucleotide sequence having at least 70%, 75%, 75%, 80%, 81%, 82%, 83%, 84%, 85%, 90%, 91%, 92%, 93%, 94%, 95%, 96%, 97%, 98%, 99%, or more sequence identity to a reference polynucleotide sequence corresponding to nucleotide residues 21 to 2670 of SEQ ID NO: 3, 31, 43, 155, 233, 237, 381, 393, 587, 603, 685, 691, 711, or 799, or a reference polynucleotide sequence corresponding to SEQ ID NO: 3, 31, 43, 155, 233, 237, 381, 393, 587, 603, 685, 691, 711, or 799, wherein the recombinant polynucleotide encodes an RNA polymerase.

[0063] In some embodiments, the polynucleotide sequence of the recombinant polynucleotide encoding an engineered RNA polymerase is codon optimized. In some embodiments, the polynucleotide sequence is codon optimized for expression in a bacterial cell, fungal cell, insect cell, or mammalian cell.

[0064] In some embodiments, the recombinant polynucleotide comprises a polynucleotide sequence comprising nucleotide residues 21 to 2670 of an odd-numbered SEQ ID NO. of SEQ ID NOs: 3-827, or comprising an odd numbered SEQ ID NO. of SEQ ID NOs: 3-827.

[0065] In a further aspect, the present disclosure provides expression vectors comprising at least one recombinant polynucleotide encoding an engineered RNA polymerase described herein. In some embodiments, the recombinant polynucleotide in the expression vector is operably linked to a control sequence. In some embodiments, the control sequence comprises a promoter, particularly a heterologous promoter.

[0066] In another aspect, the present disclosure also provides a host cell transformed with at least one expression vector provided herein. In some embodiments, the host cell is a prokaryotic cell or a eukaryotic cell. In some embodiments, the host cell is a bacterial cell, fungal cell, insect cell, or mammalian cell. In some preferred embodiments, the host cell is a bacterial cell, such as E. coli. or B. subtilis.

[0067] In a further aspect, the present disclosure provides a method of producing an engineered RNA polymerase polypeptide, the method comprising culturing a host cell described herein under suitable culture conditions such that at least one engineered RNA polymerase is produced. In some embodiments, the method further comprises recovering or isolating the expressed engineered RNA polymerase from the culture and/or host cells. In some embodiments, the method further comprises purifying the engineered RNA polymerase.

[0068] In another aspect, the present disclosure provides a composition comprising at least one engineered RNA polymerase disclosed herein. In some embodiments, the composition further comprises at least a buffer. In some embodiments, the composition further comprises a reducing agent, such as dithiothreitol or mercaptoethanol. In some embodiments, the composition further comprises one or more nucleotide triphosphate (NTP) substrates, particularly rNTP substrates. In some embodiments, the composition further comprises a cap analog. In some embodiments, the composition further comprises a target DNA template. In some embodiments, the target DNA template comprises a promoter recognized by the engineered RNA polymerase. In some embodiments, the composition further comprises a pyrophosphatase and/or an RNase inhibitor. In some embodiments, the composition further comprises an additive, such as a molecular crowding agent.

[0069] In a further aspect, the present disclosure provides a method of producing RNA, the method comprising contacting a target DNA template with an engineered RNA polymerase described herein in presence of one or more nucleotide triphosphates under conditions suitable for transcription of the target DNA template. In some embodiments, the method further comprises providing a cap analog. In some embodiments, the method further comprises a pyrophosphatase and/or an RNase inhibitor in the reaction with the engineered RNA polymerase. In some embodiments, the suitable conditions comprise a temperature of about 25° C. to about 40° C. In some embodiments, the suitable conditions include an additive, such as a molecular crowding agent.

[0070] In a further aspect, the present disclosure also provides a kit comprising at least one engineered RNA polymerase disclosed herein. In some embodiments, the kit further comprises one or more of a buffer, one or more rNTPs, Mg⁺², a reducing agent, and a molecular crowding agent. In some embodiments, the kit further comprises a suitable DNA template.

### DETAILED DESCRIPTION

[0071] The present disclosure provides engineered RNA polymerase polypeptides and compositions thereof, where the engineered RNA polymerase displays one or more improved properties, including, among others, increased activity, increased stability, increased thermal stability, and increased product integrity. The present disclosure further provides recombinant polynucleotides encoding the engineered RNA polymerase polypeptides and methods of using the engineered RNA polymerase for producing RNA. In some embodiments, the expressed RNA encodes a polypeptide or is a non-coding RNA (ncRNA), such as shRNA, miRNA, or guide RNA.

### Abbreviations and Definitions

[0072] In reference to the present disclosure, the technical and scientific terms used in the descriptions herein will have the meanings commonly understood by one of ordinary skill in the art, unless specifically defined otherwise.

[0073] It is to be understood that this invention is not limited to the particular methodology, protocols, and reagents described, as these may vary, depending upon the context they are used by those of skill in the art. Accordingly, the terms defined immediately below are more fully described by reference to the application as a whole.

[0074] As used herein, the singular “a”, “an,” and “the” include the plural references, unless the context clearly indicates otherwise.

[0075] As used herein, the term “comprising” and its cognates are used in their inclusive sense (i.e., equivalent to the term “including” and its corresponding cognates).

[0076] It is also to be understood that where description of embodiments use the term “comprising” and its cognates, the embodiments can also be described using language “consisting essentially of” or “consisting of.”

[0077] Moreover, numeric ranges are inclusive of the numbers defining the range. Thus, every numerical range disclosed herein is intended to encompass every narrower numerical range that falls within such broader numerical range, as if such narrower numerical ranges were all expressly written herein. It is also intended that every maximum (or minimum) numerical limitation disclosed herein includes every lower (or higher) numerical limitation, as if such lower (or higher) numerical limitations were expressly written herein.

[0078] As used herein, the term “about” means an acceptable error for a particular value. In some instances, “about” means within 0.05%, 0.5%, 1.0%, or 2.0%, of a given value range. In some instances, “about” means within 1, 2, 3, or 4 standard deviations of a given value.

[0079] Furthermore, the headings provided herein are not limitations of the various aspects or embodiments of the invention which can be had by reference to the application as a whole. Accordingly, the terms defined immediately below are more fully defined by reference to the application as a whole.

[0080] “ATCC” refers to the American Type Culture Collection whose biorepository collection includes genes and strains.

[0081] “NCBI” refers to National Center for Biological Information and the sequence databases provided therein.

[0082] “Protein,” “polypeptide,” and “peptide” are used interchangeably to denote a polymer of at least two amino acids covalently linked by an amide bond, regardless of length or post-translational modification (e.g., glycosylation or phosphorylation).

[0083] “Amino acids” are referred to herein by either their commonly known three-letter symbols or by the one-letter symbols recommended by IUPAC-IUB Biochemical Nomenclature Commission. The abbreviations used for the genetically encoded amino acids are conventional and are as follows: alanine (Ala or A), arginine (Arg or R), asparagine (Asn or N), aspartate (Asp or D), cysteine (Cys or C), glutamate (Glu or E), glycine (Gly or G), glutamine (Gln or Q), histidine (His or H), isoleucine (Ile or I), leucine (Leu or L), lysine (Lys or K), methionine (Met or M), phenylalanine (Phe or F), proline (Pro or P), serine (Ser or S), threonine (Thr or T), tryptophan (Trp or W), tyrosine (Tyr or Y), and valine (Val or V). When the three-letter abbreviations are used, unless specifically preceded by an “L” or a “D” or clear from the context in which the abbreviation is used, the amino acid may be in either the L- or D-configuration about α-carbon (Cα). For example, whereas “Ala” designates alanine without specifying the configuration about the α carbon, “D-Ala” and “L-Ala” designate D-alanine and L-alanine, respectively. When the one-letter abbreviations are used, upper case letters designate amino acids in the L-configuration about the α-carbon and lower case letters designate amino acids in the D-configuration about the α-carbon. For example, “A” designates L-alanine and “a” designates D-alanine. When polypeptide sequences are presented as a string of one-letter or three-letter abbreviations (or mixtures thereof), the sequences are presented in the amino (N) to carboxy (C) direction in accordance with common convention.

[0084] “RNA polymerase” or “RNAP” refers to an enzyme that catalyzes the synthesis of RNA in the 5′ to 3′ direction using a polynucleotide as a template. In some embodiments, the RNA polymerase uses a DNA template and is, in some embodiments, referred to as a DNA-directed or DNA-dependent RNA polymerase. In some embodiments, the RNA polymerase uses an RNA template and is, in some embodiments, referred to as an RNA-directed or RNA-dependent RNA polymerase. In some embodiments, an RNA polymerase is capable of using DNA and RNA as a template for synthesis of the RNA. In some embodiments, the RNA product is referred to as a “RNA transcript.”

[0085] “Cap” as used herein refers to the nucleoside that is joined via its 5′ carbon to a triphosphate group that is, in turn joined to the 5′ carbon of the most 5′ nucleotide of an RNA transcript. In some embodiments, the nucleoside of the cap is a guanine (G). In some embodiments, the nitrogen at the 7-position of guanine in the cap is methylated and is denoted as m7G. In some embodiments, the cap is a dinucleotide cap, trinucleotide cap, or a tetranucleotide cap. The terms “capped RNA,” “5′ capped RNA,” and “capped mRNA” refer to RNA and mRNA, respectively that comprise the cap.

[0086] “Fusion protein,” and “chimeric protein” and “chimera” refer to hybrid proteins created through the joining of two or more polynucleotides that originally encode separate proteins. In some embodiments, fusion proteins are created by recombinant technology (e.g., molecular biology techniques known in the art).

[0087] “Polynucleotide,” “nucleic acid,” or “oligonucleotide” is used herein to denote a polymer comprising at least two nucleotides where the nucleotides are either deoxyribonucleotides or ribonucleotides or mixtures of deoxyribonucleotides and ribonucleotides. In some embodiments, the abbreviations used for genetically encoding nucleosides are conventional and are as follow: adenosine (A); guanosine (G); cytidine (C); thymidine (T); and uridine (U). Unless specifically delineated, the abbreviated nucleosides may be either ribonucleosides or 2′-deoxyribonucleosides. The nucleosides may be specified as being either ribonucleosides or 2′-deoxyribonucleosides on an individual basis or on an aggregate basis. When polynucleotide, nucleic acid, or oligonucleotide sequences are presented as a string of one-letter abbreviations, the sequences are presented in the 5′ to 3′ direction in accordance with common convention, and the phosphates are not indicated. The term “DNA” refers to deoxyribonucleic acid. The term “RNA” refers to ribonucleic acid. The polynucleotide or nucleic acid may be single-stranded or double-stranded, or may include both single-stranded regions and double-stranded regions.

[0088] “Duplex” and “ds” refer to a double-stranded nucleic acid (e.g., DNA or RNA) molecule comprised of two single-stranded polynucleotides that are complementary in their sequence (A pairs to T or U, C pairs to G), arranged in an antiparallel 5′ to 3′ orientation, and held together by hydrogen bonds between the nucleobases (e.g., adenine [A], guanine [G], cytosine [C], thymine [T], uridine [U]).

[0089] “Engineered,” “recombinant,” “non-naturally occurring,” and “variant,” when used with reference to a cell, a polynucleotide or a polypeptide refer to a material or a material corresponding to the natural or native form of the material that has been modified in a manner that would not otherwise exist in nature or is identical thereto but produced or derived from synthetic materials and/or by manipulation using recombinant techniques.

[0090] “Wild-type” and “naturally occurring” refer to the form found in nature. For example, a wild-type polypeptide or polynucleotide sequence is a sequence present in an organism that can be isolated from a source in nature and which has not been intentionally modified by human manipulation.

[0091] “Coding sequence” refers to that part of a nucleic acid (e.g., a gene) that encodes an amino acid sequence of a protein.

[0092] “Percent (%) sequence identity” refers to comparisons among polynucleotides and polypeptides, and are determined by comparing two optimally aligned sequences over a comparison window, wherein the portion of the polynucleotide or polypeptide sequence in the comparison window may comprise additions or deletions (i.e., gaps) as compared to the reference sequence for optimal alignment of the two sequences. The percentage may be calculated by determining the number of positions at which the identical nucleic acid base or amino acid residue occurs in both sequences to yield the number of matched positions, dividing the number of matched positions by the total number of positions in the window of comparison and multiplying the result by 100 to yield the percentage of sequence identity. Alternatively, the percentage may be calculated by determining the number of positions at which either the identical nucleic acid base or amino acid residue occurs in both sequences or a nucleic acid base or amino acid residue is aligned with a gap to yield the number of matched positions, dividing the number of matched positions by the total number of positions in the window of comparison and multiplying the result by 100 to yield the percentage of sequence identity. Those of skill in the art appreciate that there are many established algorithms available to align two sequences. Optimal alignment of sequences for comparison can be conducted, e.g., by the local homology algorithm of Smith and Waterman (Smith and Waterman, Adv. Appl. Math., 1981, 2:482), by the homology alignment algorithm of Needleman and Wunsch (Needleman and Wunsch, J. Mol. Biol., 1970, 48:443), by the search for similarity method of Pearson and Lipman (Pearson and Lipman, Proc. Natl. Acad. Sci. USA, 1988, 85:2444), by computerized implementations of these algorithms (e.g., GAP, BESTFIT, FASTA, and TFASTA in the GCG Wisconsin Software Package), or by visual inspection, as known in the art. Examples of algorithms that are suitable for determining percent sequence identity and sequence similarity include, but are not limited to the BLAST and BLAST 2.0 algorithms (see, e.g., Altschul et al., J. Mol. Biol., 1990, 215: 403-410; and Altschul et al., Nucleic Acids Res., 1977, 3389-3402). Software for performing BLAST analyses is publicly available through the National Center for Biotechnology Information website. This algorithm involves first identifying high scoring sequence pairs (HSPs) by identifying short words of length “W” in the query sequence, which either match or satisfy some positive-valued threshold score “T,” when aligned with a word of the same length in a database sequence. T is referred to as the neighborhood word score threshold (see Altschul et al, supra). These initial neighborhood word hits act as seeds for initiating searches to find longer HSPs containing them. The word hits are then extended in both directions along each sequence for as far as the cumulative alignment score can be increased. Cumulative scores are calculated using, for nucleotide sequences, the parameters “M” (reward score for a pair of matching residues; always >0) and “N” (penalty score for mismatching residues; always <0). For amino acid sequences, a scoring matrix is used to calculate the cumulative score. Extension of the word hits in each direction are halted when: the cumulative alignment score falls off by the quantity “X” from its maximum achieved value; the cumulative score goes to zero or below, due to the accumulation of one or more negative-scoring residue alignments; or the end of either sequence is reached. The BLAST algorithm parameters W, T, and X determine the sensitivity and speed of the alignment. The BLASTN program (for nucleotide sequences) uses as defaults a wordlength (W) of 11, an expectation (E) of 10, M=5, N=−4, and a comparison of both strands. For amino acid sequences, the BLASTP program uses as defaults a wordlength (W) of 3, an expectation (E) of 10, and the BLOSUM62 scoring matrix (see, e.g., Henikoff and Henikoff, Proc. Natl. Acad. Sci. USA, 1989, 89:10915). Exemplary determination of sequence alignment and % sequence identity can employ the BESTFIT or GAP programs in the GCG Wisconsin Software package (Accelrys, Madison WI), using default parameters provided.

[0093] “Reference sequence” refers to a defined sequence used as a basis for a sequence comparison. A reference sequence may be a subset of a larger sequence, for example, a segment of a full-length gene or polypeptide sequence. Generally, a reference sequence is at least 20 nucleotide or amino acid residues in length, at least 25 residues in length, at least 50 residues in length, at least 100 residues in length or the full length of the nucleic acid or polypeptide. Since two polynucleotides or polypeptides may each (1) comprise a sequence (i.e., a portion of the complete sequence) that is similar between the two sequences, and (2) may further comprise a sequence that is divergent between the two sequences, sequence comparisons between two (or more) polynucleotides or polypeptide are typically performed by comparing sequences of the two polynucleotides or polypeptides over a “comparison window” to identify and compare local regions of sequence similarity. In some embodiments, a “reference sequence” can be based on a primary amino acid sequence, where the reference sequence is a sequence that can have one or more changes in the primary sequence. For instance, the phrase “a reference sequence corresponding to SEQ ID NO: 2, having a glycine (G) at the residue corresponding to X38” (or “a reference sequence corresponding to SEQ ID NO: 2, having an glycine (G) at the residue corresponding to position 38”) refers to a reference sequence in which the corresponding residue at position X38 in SEQ ID NO: 2 (e.g., an arginine, R), has been changed to glycine (G).

[0094] “Comparison window” refers to a conceptual segment of contiguous nucleotide positions or amino acids residues wherein a sequence may be compared to a reference sequence. In some embodiments, the comparison window is at least 15 to 20 contiguous nucleotides or amino acids and wherein the portion of the sequence in the comparison window may comprise additions or deletions (i.e., gaps) of 20 percent or less as compared to the reference sequence (which does not comprise additions or deletions) for optimal alignment of the two sequences. In some embodiments, the comparison window can be longer than 15-20 contiguous residues, and includes, optionally 30, 40, 50, 100, or longer windows.

[0095] “Corresponding to”, “reference to,” and “relative to” when used in the context of the numbering of a given amino acid or polynucleotide sequence refer to the numbering of the residues of a specified reference sequence when the given amino acid or polynucleotide sequence is compared to the reference sequence. In other words, the residue number or residue position of a given polymer is designated with respect to the reference sequence rather than by the actual numerical position of the residue within the given amino acid or polynucleotide sequence. For example, a given amino acid sequence, such as that of an engineered RNA polymerase, can be aligned to a reference sequence by introducing gaps to optimize residue matches between the two sequences. In these cases, although the gaps are present, the numbering of the residue in the given amino acid or polynucleotide sequence is made with respect to the reference sequence to which it has been aligned. In some embodiments, the reference sequence is tagged (e.g., with a histidine tag).

[0096] “Mutation” refers to the alteration of a nucleic acid sequence. In some embodiments, mutations result in changes to the encoded polypeptide sequence (i.e., as compared to the original sequence without the mutation). In some embodiments, the mutation comprises a substitution, such that a different amino acid is produced. In some alternative embodiments, the mutation comprises an addition, such that an amino acid is added (e.g., insertion) to the original polypeptide sequence. In some further embodiments, the mutation comprises a deletion, such that an amino acid is deleted from the original polypeptide sequence. Any number of mutations may be present in a given sequence.

[0097] “Amino acid difference” and “residue difference” refer to a difference in the amino acid residue at a position of a polypeptide sequence relative to the amino acid residue at a corresponding position in a reference sequence. The positions of amino acid differences generally are referred to herein as “Xn,” where n refers to the corresponding position in the reference sequence upon which the residue difference is based. For example, a “residue difference at position X38 as compared to SEQ ID NO: 2” (or a “residue difference at position 38 as compared to SEQ ID NO: 2”) refers to a difference of the amino acid residue at the polypeptide position corresponding to position 38 of SEQ ID NO: 2. Thus, if the reference polypeptide of SEQ ID NO: 2 has an arginine (R) at position 38, then a “residue difference at position X38 as compared to SEQ ID NO: 2” refers to an amino acid substitution of any residue other than arginine (R) at the position of the polypeptide corresponding to position 38 of SEQ ID NO: 2. In some instances herein, the specific amino acid residue difference at a position is indicated as “XnY” where “Xn” specified the corresponding residue and position of the reference polypeptide (as described above), and “Y” is the single letter identifier of the amino acid found in the engineered polypeptide (i.e., the different residue than in the reference polypeptide). In some instances (e.g., in the Tables in the Examples), the present disclosure also provides specific amino acid differences denoted by the conventional notation “AnB”, where A is the single letter identifier of the residue in the reference sequence, “n” is the number of the residue position in the reference sequence, and B is the single letter identifier of the residue substitution in the sequence of the engineered polypeptide. In some embodiments, the amino acid difference, e.g., a substitution, is denoted by the abbreviation “nB,” without the identifier for the residue in the reference sequence. In some embodiments, the phrase “an amino acid residue nB” denotes the presence of the amino residue in the engineered polypeptide, which may or may not be a substitution in context of a reference sequence. In some embodiments, the “substitution” comprises the deletion of an amino acid, and can be denoted by “−” symbol.

[0098] In some instances, a polypeptide of the present disclosure can include one or more amino acid residue differences relative to a reference sequence, which is indicated by a list of the specified positions where residue differences are present relative to the reference sequence. In some embodiments, where more than one amino acid can be used in a specific residue position of a polypeptide, the various amino acid residues that can be used are separated by a “/” (e.g., X340E/X340W, X340E/W, X340E/W or 340E/W). The present disclosure includes engineered polypeptide sequences comprising one or more amino acid differences that include either/or both conservative and non-conservative amino acid substitutions, as well as insertions and deletions of amino acids in the sequence.

[0099] “Amino acid substitution set” and “substitution set” refers to a group of amino acid substitutions within a polypeptide sequence. In some embodiments, substitution sets comprise 2, 3, 4, 5, 6, 7, 8, 9, 10, 11, 12, 13, 14, 15, or more amino acid substitutions. In some embodiments, a substitution set refers to the set of amino acid substitutions that is present in any of the variant RNA polymerase polypeptides listed in any of the Tables in the Examples. In these substitution sets, the individual substitutions are separated by a semicolon (e.g., V401R;Y404L) or slash (“/”; e.g., V401R/Y404L or 401R/404L).

[0100] “Conservative amino acid substitution” refers to a substitution of a residue with a different residue having a similar side chain, and thus typically involves substitution of the amino acid in the polypeptide with amino acids within the same or similar defined class of amino acids. By way of example and not limitation, an amino acid with an aliphatic side chain may be substituted with another aliphatic amino acid (e.g., alanine, valine, leucine, and isoleucine); an amino acid with hydroxyl side chain is substituted with another amino acid with a hydroxyl side chain (e.g., serine and threonine); an amino acids having aromatic side chains is substituted with another amino acid having an aromatic side chain (e.g., phenylalanine, tyrosine, tryptophan, and histidine); an amino acid with a basic side chain is substituted with another amino acid with a basis side chain (e.g., lysine and arginine); an amino acid with an acidic side chain is substituted with another amino acid with an acidic side chain (e.g., aspartic acid or glutamic acid); and a hydrophobic or hydrophilic amino acid is replaced with another hydrophobic or hydrophilic amino acid, respectively.

[0101] “Non-conservative substitution” refers to substitution of an amino acid in the polypeptide with an amino acid with significantly differing side chain properties. Non-conservative substitutions may use amino acids between, rather than within, the defined groups and affect: (a) the structure of the peptide backbone in the area of the substitution (e.g., proline for glycine); (b) the charge or hydrophobicity; and/or (c) the bulk of the side chain. By way of example and not limitation, exemplary non-conservative substitutions include an acidic amino acid substituted with a basic or aliphatic amino acid; an aromatic amino acid substituted with a small amino acid; and a hydrophilic amino acid substituted with a hydrophobic amino acid.

[0102] “Deletion” refers to modification to the polypeptide by removal of one or more amino acids from the reference polypeptide. Deletions can comprise removal of 1 or more amino acids, 2 or more amino acids, 5 or more amino acids, 10 or more amino acids, 15 or more amino acids, or 20 or more amino acids, up to 10% of the total number of amino acids, or up to 20% of the total number of amino acids making up the reference polypeptide while retaining biological activity and/or retaining the improved properties of an engineered RNA polymerase. Deletions can be directed to the internal portions and/or terminal portions of the polypeptide. In various embodiments, the deletion can comprise a continuous segment or can be discontinuous. Deletions are indicated by “−”, and may be present in substitution sets.

[0103] “Insertion” refers to modification to the polypeptide by addition of one or more amino acids from the reference polypeptide. Insertions can be in the internal portions of the polypeptide, or to the carboxy or amino terminus. Insertions as used herein include fusion proteins as is known in the art. The insertion can be a contiguous segment of amino acids or separated by one or more of the amino acids in the naturally occurring polypeptide.

[0104] “Functional fragment” and “biologically active fragment” are used interchangeably herein, to refer to a polypeptide that has an amino-terminal and/or carboxy-terminal deletion(s) and/or internal deletions, but where the remaining amino acid sequence is identical to the corresponding positions in the sequence to which it is being compared (e.g., a full length engineered RNA polymerase of the present disclosure) and that retains substantially all of the activity of the full-length polypeptide.

[0105] “Isolated polypeptide” refers to a polypeptide which is substantially separated from other contaminants that naturally accompany it (e.g., protein, lipids, and polynucleotides). The term embraces polypeptides which have been removed or purified from their naturally occurring environment or expression system (e.g., host cell or in vitro synthesis). The recombinant RNA polymerase polypeptides may be present within a cell, present in the cellular medium, or prepared in various forms, such as lysates or isolated preparations. As such, in some embodiments, the recombinant RNA polymerase polypeptides provided herein are isolated polypeptides.

[0106] “Substantially pure polypeptide” refers to a composition in which the polypeptide species is the predominant species present (i.e., on a molar or weight basis it is more abundant than any other individual macromolecular species in the composition), and is generally a substantially purified composition when the object species comprises at least about 50 percent of the macromolecular species present by mole or % weight. Generally, a substantially pure RNA polymerase composition will comprise about 60% or more, about 70% or more, about 80% or more, about 90% or more, about 95% or more, and about 98% or more of all macromolecular species by mole or % weight present in the composition. In some embodiments, the object species is purified to essential homogeneity (i.e., contaminant species cannot be detected in the composition by conventional detection methods) wherein the composition consists essentially of a single macromolecular species. Solvent species, small molecules (<500 Daltons), and elemental ion species are not considered macromolecular species. In some embodiments, the isolated recombinant RNA polymerase polypeptides are substantially pure polypeptide compositions.

[0107] “Improved property” refers to an engineered RNA polymerase polypeptide that exhibits an improvement in any RNA polymerase property as compared to a reference RNA polymerase polypeptide, such as a wild-type RNA polymerase polypeptide or another engineered RNA polymerase polypeptide. Improved properties include, but are not limited to, such properties as increased protein expression, increased activity, increased stability, increased thermostability, increased pH stability, increased chemical stability, improved solvent stability, increased solubility, and increased product integrity.

[0108] “Increased enzyme activity” and “enhanced enzyme activity” refer to an improved property of the engineered RNA polymerase polypeptides, which can be represented by an increase in specific activity as compared to the reference RNA polymerase polypeptide (e.g., wild-type RNA polymerase and/or another engineered RNA polymerase). Exemplary methods to determine enzyme activity are provided in the Examples. Improvements in enzyme activity can be from about 1.1 fold the enzyme activity of the corresponding wild-type or reference polypeptide, to about 1.5 fold, 2-fold, 5-fold, 10-fold, 20-fold, 25-fold, 50-fold, 75-fold, 100-fold, 150-fold, 200-fold or more enzyme activity than the naturally-occurring RNA polymerase or another engineered RNA polymerase from which the RNA polymerase polypeptides were derived.

[0109] “Processivity” in context of an RNA polymerase refers to the ability of the nucleic acid polymerase to catalyze the production of the total RNA product. In some embodiments, processivity is measured by the titer of the total RNA product, which is the concentration of the total RNA, for example, as measured by the methods described in the Examples. In some embodiments, increased “processivity” in context of nucleic acid polymerase refers to the increase in titer of full-length product compared with a reference polymerase.

[0110] “Integrity” in context of RNA product refers to the homogeneity of the RNA product from a transcription reaction, e.g., in vitro transcription reaction (IVT). In some embodiments, “integrity” is defined as the amount of the desired or target full-length RNA divided by the total amount of RNA produced, e.g., the area of the full length RNA electrophoretic peak divided by the area of the electropherogram trace through Fragment Analyzer, as described in the Examples. “Integrity score” is the reciprocal of one minus integrity:

$$Integrity score = \frac{1}{1 - integrity} = \frac{1}{1 - \frac{desired RNA peak area}{total RNA area}} .$$

An increased “integrity” or “integrity score” in context of RNA product refers to the increase in purity of full-length product compared with that from a reference transcription reaction e.g., IVT.

[0111] “Codon optimized” refers to changes in the codons of the polynucleotide encoding a protein to those preferentially used in a particular organism such that the encoded protein is more efficiently expressed in that organism. Although the genetic code is degenerate, in that most amino acids are represented by several codons, called “synonyms” or “synonymous” codons, it is well known that codon usage by particular organisms is nonrandom and biased towards particular codon triplets. This codon usage bias may be higher in reference to a given gene, genes of common function or ancestral origin, highly expressed proteins versus low copy number proteins, and the aggregate protein coding regions of an organism's genome. In some embodiments, the polynucleotides encoding the RNA polymerase polypeptides are codon optimized for optimal production from the host organism selected for expression.

[0112] “Control sequence” refers herein to include all components that are necessary or advantageous for the expression of a polynucleotide and/or polypeptide of the present disclosure. Each control sequence may be native or foreign to the nucleic acid sequence encoding the polypeptide. Such control sequences include, but are not limited to, leaders, polyadenylation sequences, propeptide sequences, promoter sequences, signal peptide sequences, initiation sequences, and transcription terminators. In some embodiments, at a minimum, the control sequences include a promoter, and transcriptional and translational stop signals. In some embodiments, the control sequences are provided with linkers for the purpose of introducing specific restriction sites facilitating ligation of the control sequences with the coding region of the nucleic acid sequence encoding a polypeptide.

[0113] “Operably linked” or “operatively linked” refers to a configuration in which a control sequence is appropriately placed (i.e., in a functional relationship) at a position relative to a polynucleotide of interest such that the control sequence directs or regulates the expression of the polynucleotide, and where relevant, expression of an encoded polypeptide of interest.

[0114] “Promoter” or “promoter sequence” refers to a nucleic acid sequence that is recognized by a host cell for expression of a polynucleotide of interest, such as a coding sequence. The promoter sequence contains transcriptional control sequences that mediate the expression of a polynucleotide of interest. The promoter may be any nucleic acid sequence which shows transcriptional activity in the host cell of choice including mutant, truncated, and hybrid promoters, and may be obtained from genes encoding extracellular or intracellular polypeptides either homologous or heterologous to the host cell. In some embodiments, a “promoter” or “promoter sequence” refers to the nucleic acid sequence recognized by an engineered RNA polymerase.

[0115] “Suitable reaction conditions” or “suitable conditions” refers to those conditions (e.g., temperature, pH, buffers, salts, co-solvents, etc.) under which an RNA polymerase of the present disclosure is capable of synthesizing an RNA transcript. Exemplary “suitable conditions” are provided herein (see, e.g., the Examples).

[0116] “Culturing” refers to the growing of a population of cells, e.g., host cells, under suitable conditions using any suitable medium (e.g., liquid, gel, or solid).

[0117] “Vector” is a recombinant construct for introducing a polynucleotide of interest into a cell. In some embodiments, the vector is an expression vector that is operably linked to a suitable control sequence capable of effecting the expression in a suitable host of the polynucleotide and/or a polypeptide encoded in the polynucleotide. In some embodiments, an “expression vector” has a promoter sequence operably linked to the polynucleotide (e.g., transgene) to drive expression in a host cell, and in some embodiments, also comprises a transcription terminator sequence.

[0118] “Expression” includes any step involved in the production of the polypeptide including, but not limited to, transcription, post-transcriptional modification, translation, and post-translational modification. In some embodiments, the term also encompasses secretion of the polypeptide from a cell.

[0119] “Produces” refers to the production of proteins and/or other compounds by cells. It is intended that the term encompass any step involved in the production of polypeptides including, but not limited to, transcription, post-transcriptional modification, translation, and post-translational modification. In some embodiments, the term also encompasses secretion of the polypeptide from a cell.

[0120] “Heterologous” or “recombinant” refers to the relationship between two or more nucleic acid or polypeptide sequences (e.g., a promoter sequence, signal peptide, terminator sequence, etc.) that are derived from different sources and are not associated in nature.

[0121] “Host cell” and “host strain” refer to suitable hosts for expression vectors comprising a polynucleotide provided herein (e.g., a polynucleotide sequences encoding at least one RNA polymerase variant). In some embodiments, the host cells are prokaryotic or eukaryotic cells that have been transformed or transfected with vectors constructed using recombinant DNA techniques as known in the art.

### Engineered RNA Polymerase Polypeptides

[0122] In one aspect, the present disclosure provides RNA polymerases engineered to have improved properties, including, among others, increased activity, increased stability, increased thermostability, and/or increased product integrity. In some embodiments, the engineered RNA polymerase variants find use in applications for preparing RNA and other molecular biological techniques.

[0123] In some embodiments, the engineered RNA polymerase, or a functional fragment thereof, comprises an amino acid sequence having at least 70%, 75%, 80%, 81%, 82%, 83%, 84%, 85%, 86%, 87%, 88%, 89%, 90%, 91%, 92%, 93%, 94%, 95%, 96%, 97%, 98%, 99%, or more sequence identity to a reference sequence corresponding to residues 8 to 890 of SEQ ID NO: 2, 4, 32, 44, 156, 234, 238, 386, 394, 588, 604, 686, 692, 712, or 800, or to a reference sequence corresponding to SEQ ID NO: 2, 4, 32, 44, 156, 234, 238, 386, 394, 588, 604, 686, 692, 712, or 800, wherein the amino acid sequence comprises one or more substitutions relative to the reference sequence corresponding to residues 8 to 890 of SEQ ID NO: 2, 4, 32, 44, 156, 234, 238, 386, 394, 588, 604, 686, 692, 712, or 800, or relative to the reference sequence corresponding to SEQ ID NO: 2, 4, 32, 44, 156, 234, 238, 386, 394, 588, 604, 686, 692, 712, or 800.

[0124] In some embodiments, the engineered RNA polymerase comprises an amino acid sequence having at least 70%, 75%, 80%, 81%, 82%, 83%, 84%, 85%, 86%, 87%, 88%, 89%, 90%, 91%, 92%, 93%, 94%, 95%, 96%, 97%, 98%, 99%, or more sequence identity to the reference sequence corresponding to residues 8 to 890 of SEQ ID NO: 2, or to the reference sequence corresponding to SEQ ID NO: 2, wherein the amino acid sequence comprises one or more substitutions relative to the reference sequence corresponding to residues 8 to 890 of SEQ ID NO: 2, or relative to the reference sequence corresponding to SEQ ID NO: 2.

[0125] In some embodiments, the engineered RNA polymerase comprises an amino acid sequence having at least 70%, 75%, 80%, 81%, 82%, 83%, 84%, 85%, 86%, 87%, 88%, 89%, 90%, 91%, 92%, 93%, 94%, 95%, 96%, 97%, 98%, 99%, or more sequence identity to the reference sequence corresponding to residues 8 to 890 of SEQ ID NO: 4, 32, 44, 156, 234, 238, 386, 394, 588, 604, 686, 692, 712, or 800, or to the reference sequence corresponding to SEQ ID NO: 4, 32, 44, 156, 234, 238, 386, 394, 588, 604, 686, 692, 712, or 800, wherein the amino acid sequence comprises one or more substitutions relative to the reference sequence corresponding to residues 8 to 890 of SEQ ID NO: 2, or relative to the reference sequence corresponding to SEQ ID NO: 2.

[0126] In some embodiments, the engineered RNA polymerase comprises an amino acid sequence having at least 70%, 75%, 80%, 81%, 82%, 83%, 84%, 85%, 86%, 87%, 88%, 89%, 90%, 91%, 92%, 93%, 94%, 95%, 96%, 97%, 98%, 99% or more sequence identity to a reference sequence corresponding to residues 8 to 890 of an even numbered SEQ ID NO. of SEQ ID NOs: 4-828, or to a reference sequence corresponding to an even numbered SEQ ID NO. of SEQ ID NOs: 4-828, wherein the amino acid sequence comprises one or more substitutions relative to the reference sequence corresponding to residues 8 to 890 of SEQ ID NO: 2, or relative to the reference sequence corresponding to SEQ ID NO: 2.

[0127] In some embodiments, the amino acid sequence of the engineered RNA polymerase comprises at least a substitution at amino acid position 13, 14, 15, 17, 19, 21, 32, 33, 38, 45, 52, 54, 55, 56, 56, 57, 60, 61, 62, 63, 67, 69, 72, 75, 78, 81, 82, 83, 84, 89, 93, 95, 100, 105, 111, 115, 122, 124, 127, 131, 133, 135, 137, 138, 139, 140, 141, 143, 150, 160, 161, 162, 164, 166, 168, 169, 170, 171, 172, 173, 179, 185, 187, 193, 196, 207, 212, 217, 218, 221, 227, 237, 239, 240, 245, 246, 250, 253, 254, 257, 261, 272, 274, 275, 311, 336, 340, 342, 351, 357, 367, 375, 379, 382, 388, 391, 392, 394, 397, 401, 402, 403, 404, 419, 424, 437, 440, 494, 510, 514, 517, 527, 529, 530, 531, 533, 536, 589, 594, 598, 607, 609, 615, 616, 617, 625, 629, 648, 650, 655, 659, 660, 663, 664, 666, 670, 672, 690, 693, 696, 718, 720, 721, 749, 759, 763, 773, 775, 779, 782, 782, 810, 854, 857, 867, 875, or 878, or combinations thereof, wherein the amino acid positions are relative to the reference sequence corresponding to residues 8 to 890 of SEQ ID NO: 2, or relative to the reference sequence corresponding to SEQ ID NO: 2.

[0128] In some embodiments, the amino acid sequence of the engineered RNA polymerase comprises at least a substitution or amino acid residue 13N, 14Q/Y, 15T, 17N, 19E, 21G, 32S/T/V, 33E, 38G, 45K, 52T, 54H, 55D/S/W, 56E/G/N/T/V, 57G, 60G/L/M/R, 61W/Y, 62T, 63S, 67R, 69S, 72R, 75S/Y, 78S, 81C/L, 82S, 83K, 84A, 89Q, 93Y, 95Y, 100R, 105R, 111K, 115L/V, 122I, 124F, 127G, 131T, 133C, 135G/K, 137G, 138R, 139R, 140R, 141A, 143N/Q/R/V, 150Q/Y, 160F/L, 161R, 162V, 164W, 166D/R/T/V, 168K/L/R/S/T/V/W, 169G/L, 170L/Q/R/S, 171E/F/L/Y, 172A/E/G/K/R/V, 173D/H/L/Y, 179N, 185I/L/P, 187G/H/L, 193G, 196A/C/G/S/V, 207S, 212R/Y, 217P/V, 218Q/T, 221C, 227V, 237L, 239L/R, 240M, 245C, 246K/R/V, 250R, 253Y, 254G/S, 257L/V, 261M, 272N, 274G/L, 275A/Y, 311G, 336L/M/S/V, 340E/W, L342Q, 351L, 357E/P, 367F/P/T, 375F/P, 379A/S, 382G/L/R, 388K/R, 391F/S, 392A/M/R, 394K, 397S, 401R, 402T, 403V, 404I/L/S/Y, 419R/S, 424A, 437P, 440K, 494G, 510V, 514I/S, 517R, 527E, 529R, 530N, 531Q, 533S, 536E/V, 589C, 594G, 598A/K/L/R/V, 607Y, 609C/E/F/P/W, 615A, 616A, 617R, 625C, 629D/K/R, 648F, 650M, 655M/R, 659R, 660H/W/Y, 663L, 664K/P, 666M, 670Q/R, 672G/P/R/S/T, 690S, 693R, 696L, 718F/N/S/V/Y, 720A/G/I/P/S, 721A/E/M/S/T/Y, 749R, 759M, 763S, 773A, 775K/R, 779R, 782R/V, 810K, 854T, 857V, 867Q, 875C, or 878M, or combinations thereof, wherein the amino acid positions are relative to the reference sequence corresponding to residues 8 to 890 of SEQ ID NO: 2, or relative to the reference sequence corresponding to SEQ ID NO: 2.

[0129] In some embodiments, the amino acid sequence of the engineered RNA polymerase comprises at least a substitution I13N, A14Q/Y, K15T, D17N, S19E, I21G, A32S/T/V, D33E, R38G, A45K, E52T, G54H, E55D/S/W, A56E/G/N/T/V, R57G, K60G/L/M/R, M61W/Y, F62T, E63S, K67R, G69S, A72R, A75S/Y, K78S, 181C/L, T82S, T83K, L84A, I89Q, N93Y, W95Y, K100R, K105R, Q111K, E115L/V, A122I, I124F, K127G, A131T, L133C, S135G/K, D137G, N138R, T139R, T140R, V141A, A143N/Q/R/V, R150Q/Y, R160F/L, I161R, R162V, L164W, A166D/R/T/V, H168K/L/R/S/T/V/W, F169G/L, K170L/Q/R/S, K171E/F/L/Y, N172A/E/G/K/R/V, V173D/H/L/Y, K179N, Y185I/L/P, K187G/H/L, V193G, D196A/C/G/S/V, A207S, H212R/Y, 1217P/V, H218Q/T, V221C, L227V, H237L, Q239L/R, N240M, G245C, Q246K/R/V, T250R, L253Y, A254G/S, Y257L/V, I261M, S272N, M274G/L, F275A/Y, A311G, K336L/M/S/V, K340E/W, L342Q, W351L, R357E/P, L367F/P/T, D375F/P, E379A/S, T382G/L/R, A388K/R, V391F/S, Y392A/M/R, R394K, A397S, V401R, R402T, I403V, L404I/S/Y, K419R/S, P424A, S437P, N440K, E494G, A510V, L514I/S, C517R, G527E, Q529R, H530N, H531Q, L533S, N536E/V, L589C, I594G, D598A/K/L/R/V, E607Y, T609C/E/F/P/W, K615A, V616A, K617R, G625C, A629D/K/R, S648F, E650M, Q655M/R, E659R, D660H/W/Y, Q663L, W664K/P, I666M, K670Q/R, L672G/P/R/S/T, E690S, S693R, V696L, K718F/N/S/V/Y, K720A/G/I/P/S, K721A/E/M/S/T/Y, P749R, L759M, R763S, D773A, E775K/R, H779R, E782R/V, G810K, D854T, A857V, K867Q, G875C, or N878M, or combinations thereof, wherein the amino acid positions are relative to the reference sequence corresponding to residues 8 to 890 of SEQ ID NO: 2, or relative to the reference sequence corresponding to SEQ ID NO: 2.

[0130] In some embodiments, the amino acid sequence of the engineered RNA polymerase comprises at least a substitution at amino acid position 32, 38, 56, 138, 150, 170, 171, 173, 246, 311, 336, 340, 357, 388, 394, 401, 404, 437, 514, 536, 609, 629, 659, 660, 664, 779, or 782, or combinations thereof, wherein the amino acid positions are relative to the reference sequence corresponding to residues 8 to 890 of SEQ ID NO: 2, or relative to the reference sequence corresponding to SEQ ID NO: 2.

[0131] In some embodiments, the amino acid sequence of the engineered RNA polymerase comprises at least a substitution or amino acid residue 32V, 38G, 56T, 138R/N, 150Y, 170Q, 171E, 173Y, 246K, 311A/G, 336K/S, 340K/W, 357E, 388A/K, 394K, 401R, 404L/S, 437P, 514S, 536V, 609E, 629A, 659R, 660H/W, 664P, 779R, or 782V, or combinations thereof, wherein the amino acid positions are relative to the reference sequence corresponding to residues 8 to 890 of SEQ ID NO: 2, or relative to the reference sequence corresponding to SEQ ID NO: 2.

[0132] In some embodiments, the amino acid sequence of the engineered RNA polymerase comprises at least a substitution A32V, R38G, A56T, N138R/N, R150Y, K170Q, K171E, V173Y, Q246K, A311G, K336K/S, K340E/W, R357E, A388K/R, R394K, V401R, Y404L/S, S437P, L514S, N536V, T609E, R629A, E659R, D660H/W, W664P, H779R, or E782V, or combinations thereof, wherein the amino acid positions are relative to the reference sequence corresponding to residues 8 to 890 of SEQ ID NO: 2, or relative to the reference sequence corresponding to SEQ ID NO: 2.

[0133] In some embodiments, the amino acid sequence of the engineered RNA polymerase comprises at least a substitution or substitution set at amino acid position(s) 401/404, 138/311/336/340/388, 38/514, 170/171/173/336/340/514/659/660, 38/437/779, 357/394/664, 38, 138/311/336/340/357/388/394/404/664, 246/609, 32, 536, 56/150, 56/150/629/660/782, or 629, wherein the amino acid positions are relative to the reference sequence corresponding to residues 8 to 890 of SEQ ID NO: 2, or relative to the reference sequence corresponding to SEQ ID NO: 2.

[0134] In some embodiments, the amino acid sequence of the engineered RNA polymerase comprises at least a substitution or substitution set, or amino acid residue(s) 401R/404L, 138R/311G/336S/340W/388K, 38G/514S, 170Q/171E/173Y/336K/340K/514S/659R/660H, 38G/437P/779R, 357E/394K/664P, 38G, 138N/311A/336K/340K/357E/388A/394K/404S/664P, 246K/609E, 32V, 536V, 56T/150Y, 56T/150Y/629A/660W/782V, or 629K, wherein the amino acid positions are relative to the reference sequence corresponding to residues 8 to 890 of SEQ ID NO: 2, or relative to the reference sequence corresponding to SEQ ID NO: 2.

[0135] In some embodiments, the amino acid sequence of the engineered RNA polymerase comprises at least a substitution or substitution set V401R/Y404L, N138R/A311G/K336S/K340W/A388K, R38G/L514S, K170Q/K171E/V173Y/S336K/W340K/L514S/E659R/D660H, R38G/S437P/H779R, R357E/R394K/W664P, R38G, R138N/G311A/S336K/W340K/R357E/K388A/R394K/L404S/W664P, Q246K/T609E, A32V, N536V, A56T/R150Y, E56T/R150Y/R629A/H660W/E782V, or A629K, wherein the amino acid positions are relative to the reference sequence corresponding to residues 8 to 890 of SEQ ID NO: 2, or relative to the reference sequence corresponding to SEQ ID NO: 2.

[0136] In some embodiments, the amino acid sequence of the engineered RNA polymerase comprises at least a substitution or substitution set at amino acid position(s) 401/404, 336, 138, 401/403/404, 336/510, 388, 340, 401/402/404, or 351/357, wherein the amino acid positions are relative to the reference sequence corresponding to residues 8 to 890 of SEQ ID NO: 2, or relative to the reference sequence corresponding to SEQ ID NO: 2.

[0137] In some embodiments, the amino acid sequence of the engineered RNA polymerase comprises at least a substitution or substitution set, or amino acid residue(s) 401R/404L, 336S, 138R, 336V, 401R/403V/404S, 336M/510V, 336L, 388K, 340E, 401R/402T/404S, 351L/357E, or 401R/404I, wherein the amino acid positions are relative to the reference sequence corresponding to residues 8 to 890 of SEQ ID NO: 2, or relative to the reference sequence corresponding to SEQ ID NO: 2.

[0138] In some embodiments, the amino acid sequence of the engineered RNA polymerase comprises at least a substitution or substitution set V401R/Y404L, K336S, N138R, K336V, V401R/I403V/Y404S, K336M/A510V, K336L, A388K, K340E, V401R/R402T/Y404S, W351L/R357E, or V401R/Y404I, wherein the amino acid positions are relative to the reference sequence corresponding to residues 8 to 890 of SEQ ID NO: 2, or relative to the reference sequence corresponding to SEQ ID NO: 2.

[0139] In some embodiments, the amino acid sequence of the engineered RNA polymerase comprises at least a substitution set at amino acid positions 311/388/401/440, 138/340/401/404, 138/311/336/340/388/401/404, 311/388/401/404/440, 138/311/340/388/401/440, 138/336/342/401/404, or 351/388/401/404, wherein the amino acid positions are relative to the reference sequence corresponding to residues 8 to 890 of SEQ ID NO: 2, or relative to the reference sequence corresponding to SEQ ID NO: 2.

[0140] In some embodiments, the amino acid sequence of the engineered RNA polymerase comprises at least a substitution set or amino acid residues 311G/388K/401R/440K, 138R/340W/401R/404L, 138R/311G/336S/340W/388K/401R/404L, 311G/388K/401R/404L/440K, 138R/311G/340E/388K/401R/440K, 138R/336M/342Q/401R/404L, or 351L/388K/401R/404L, wherein the amino acid positions are relative to the reference sequence corresponding to residues 8 to 890 of SEQ ID NO: 2, or relative to the reference sequence corresponding to SEQ ID NO: 2.

[0141] In some embodiments, the amino acid sequence of the engineered RNA polymerase comprises at least a substitution set at amino acid positions 138/311/336/340/388/401/404/514, 38/138/311/336/340/388/401/404/514, 38/138/311/336/340/388/394/401/404/514, 38/138/311/336/340/388/394/401/404/514/664, 138/311/336/340/388/394/401/404/514/875, 138/311/336/340/388/394/401/404/514, 38/124/138/311/336/340/388/394/401/404/514, 138/171/311/336/340/388/401/404/878, 138/170/311/336/340/388/401/404, 138/173/311/336/340/388/401/404, 138/172/311/336/340/388/401/404, 138/170/311/336/340/388/401/404/629, 138/171/311/336/340/388/401/404, 138/168/311/336/340/388/401/404, 138/166/311/336/340/388/401/404, 138/166/272/274/275/311/336/340/388/401/404, 138/169/311/336/340/388/401/404, 138/207/311/336/340/388/401/404, 138/168/217/218/311/336/340/388/401/404, 138/171/311/336/340/388/401/404/530, 138/311/336/340/382/388/401/404, 138/311/336/340/388/401/404/773, 138/311/336/340/388/401/404/670, 138/311/336/340/379/388/401/404, 138/311/336/340/388/392/401/404, 138/311/336/340/388/401/404/419, 57/138/311/336/340/388/401/404, 138/164/311/336/340/388/401/404, 138/311/336/340/388/401/404/810, 138/311/336/340/388/401/404/659, 54/138/311/336/340/388/401/404, 138/172/173/311/336/340/388/401/404/514/659/660, 138/170/171/172/311/336/340/388/401/404/514/659, 138/173/311/336/340/388/401/404/514/659/660, 138/173/311/336/340/388/401/404/514/659/810, 138/170/311/336/388/401/404/514/659/660/810, 138/170/171/173/311/388/401/404/514/659/660, 57/138/171/173/311/336/340/388/401/404/514/659/660/810, 138/170/173/311/336/340/388/401/404/514/659/660/810, 57/138/171/172/311/388/401/404/514/659, 138/173/311/336/340/388/401/404/514, 138/171/172/173/311/336/340/388/401/404/514/659/660, 57/138/170/171/173/311/336/340/388/401/404/514/659/660/810, 57/138/173/311/336/340/388/401/404/514, 138/172/173/311/336/340/388/401/404/514/857, 57/138/173/311/336/388/401/404/514, 138/170/171/173/311/340/388/401/404/514, 138/171/311/336/340/388/401/404/514, 57/138/170/173/311/340/388/401/404/514, 138/170/311/340/388/401/404, 138/173/311/336/340/388/401/404/514/659, 57/138/311/336/340/388/401/404/514, or 138/173/311/336/340/388/401/404/810, wherein the amino acid positions are relative to the reference sequence corresponding to residues 8 to 890 of SEQ ID NO: 2, or relative to the reference sequence corresponding to SEQ ID NO: 2.

[0142] In some embodiments, the amino acid sequence of the engineered RNA polymerase comprises at least a substitution set, or amino acid residues 138R/311G/336S/340W/388K/401R/404L/514S, 38G/138R/311G/336S/340W/388K/401R/404L/514S, 38G/138R/311G/336S/340W/388K/394K/401R/404L/514S, 38G/138R/311G/336S/340W/388K/394K/401R/404L/514S/664P, 138R/311G/336S/340W/388K/394K/401R/404L/514S/875C, 138R/311G/336S/340W/388K/394K/401R/404L/514S, 38G/124F/138R/311G/336S/340W/388K/394K/401R/404L/514I, 138R/171E/311G/336S/340W/388K/401R/404L/878M, 138R/170Q/311G/336S/340W/388K/401R/404L, 138R/173Y/311G/336S/340W/388K/401R/404L, 138R/172V/311G/336S/340W/388K/401R/404L, 138R/173L/311G/336S/340W/388K/401R/404L, 138R/172E/311G/336S/340W/388K/401R/404L, 138R/170S/311G/336S/340W/388K/401R/404L/629D, 138R/171F/311G/336S/340W/388K/401R/404L, 138R/168V/311G/336S/340W/388K/401R/404L, 138R/172K/311G/336S/340W/388K/401R/404L, 138R/166R/311G/336S/340W/388K/401R/404L, 138R/168K/311G/336S/340W/388K/401R/404L, 138R/166V/272N/274L/275Y/311G/336S/340W/388K/401R/404L, 138R/170R/311G/336S/340W/388K/401R/404L, 138R/169L/311G/336S/340W/388K/401R/404L, 138R/207S/311G/336S/340W/388K/401R/404L, 138R/169G/311G/336S/340W/388K/401R/404L, 138R/168L/217P/218Q/311G/336S/340W/388K/401R/404L, 138R/168W/311G/336S/340W/388K/401R/404L, 138R/172R/311G/336S/340W/388K/401R/404L, 138R/166D/311G/336S/340W/388K/401R/404L, 138R/171L/311G/336S/340W/388K/401R/404L, 138R/171Y/311G/336S/340W/388K/401R/404L/530N, 138R/172A/311G/336S/340W/388K/401R/404L, 138R/173H/311G/336S/340W/388K/401R/404L, 138R/311G/336S/340W/382R/388K/401R/404L, 138R/311G/336S/340W/388K/401R/404L/773A, 138R/168R/311G/336S/340W/388K/401R/404L, 138R/311G/336S/340W/388K/401R/404L/670R, 138R/168T/311G/336S/340W/388K/401R/404L, 138R/172G/311G/336S/340W/388K/401R/404L, 138R/311G/336S/340W/379A/388K/401R/404L, 138R/311G/336S/340W/388K/392M/401R/404L, 138R/311G/336S/340W/388K/401R/404L/419R, 138R/311G/336S/340W/388K/392R/401R/404L, 138R/311G/336S/340W/388K/392A/401R/404L, 57G/138R/311G/336S/340W/388K/401R/404L, 138R/168S/311G/336S/340W/388K/401R/404L, 138R/164W/311G/336S/340W/388K/401R/404L, 138R/311G/336S/340W/388K/401R/404L/670Q, 138R/311G/336S/340W/388K/401R/404L/810K, 138R/311G/336S/340W/382G/388K/401R/404L, 138R/311G/336S/340W/388K/401R/404L/659R, 54H/138R/311G/336S/340W/388K/401R/404L, 138R/311G/336S/340W/388K/401R/404L/419S, 138R/172E/173Y/311G/336S/340W/388K/401R/404L/514S/659R/660H, 138R/170Q/171E/172E/311G/336S/340W/388K/401R/404L/514S/659R, 138R/173Y/311G/336S/340W/388K/401R/404L/514S/659R/660H, 138R/173Y/311G/336S/340W/388K/401R/404L/514S/659R/810K, 138R/170Q/311G/336S/388K/401R/404L/514S/659R/660H/810K, 138R/170Q/171E/173Y/311G/388K/401R/404L/514S/659R/660H, 57G/138R/171E/173Y/311G/336S/340W/388K/401R/404L/514S/659R/660H/810K, 138R/170Q/173Y/311G/336S/340W/388K/401R/404L/514S/659R/660H/810K, 57G/138R/171E/172K/311G/388K/401R/404L/514S/659R, 138R/173Y/311G/336S/340W/388K/401R/404L/514S, 138R/171E/172E/173Y/311G/336S/340W/388K/401R/404L/514S/659R/660H, 57G/138R/170Q/171E/173Y/311G/336S/340W/388K/401R/404L/514S/659R/660H/810K, 57G/138R/173Y/311G/336S/340W/388K/401R/404L/514S, 138R/172K/173D/311G/336S/340W/388K/401R/404L/514S/857V, 57G/138R/173Y/311G/336S/388K/401R/404L/514S, 138R/170Q/171E/173Y/311G/340W/388K/401R/404L/514S, 138R/171E/311G/336S/340W/388K/401R/404L/514S, 57G/138R/170Q/173Y/311G/340W/388K/401R/404L/514S, 138R/170Q/311G/340W/388K/401R/404L, 138R/173Y/311G/336S/340W/388K/401R/404L/514S/659R, 57G/138R/311G/336S/340W/388K/401R/404L/514S, or 138R/173Y/311G/336S/340W/388K/401R/404L/810K, wherein the amino acid positions are relative to the reference sequence corresponding to residues 8 to 890 of SEQ ID NO: 2, or relative to the reference sequence corresponding to SEQ ID NO: 2.

[0143] In some embodiments, the amino acid sequence of the engineered RNA polymerase comprises at least a substitution set at amino acid positions 38/138/311/340/388/401/404/514, 38/138/143/311/388/401/404/514/782, or 38/138/143/311/357/388/401/404, wherein the amino acid positions are relative to the reference sequence corresponding to residues 8 to 890 of SEQ ID NO: 2, or relative to the reference sequence corresponding to SEQ ID NO: 2.

[0144] In some embodiments, the amino acid sequence of the engineered RNA polymerase comprises at least a substitution set, or amino acid residues 38G/138R/311G/340W/388K/401R/404L/514S, 38G/138R/143V/311G/388K/401R/404L/514S/782V, or 38G/138R/143V/311G/357E/388K/401R/404L, wherein the amino acid positions are relative to the reference sequence corresponding to residues 8 to 890 of SEQ ID NO: 2, or relative to the reference sequence corresponding to SEQ ID NO: 2.

[0145] In some embodiments, the amino acid sequence of the engineered RNA polymerase comprises at least a substitution set at amino acid positions 138/173/207/311/336/340/388/401/404/514/659/660, 138/173/311/336/340/388/401/404/419/514/659/660, 138/173/207/311/388/401/404/514/659/660, 138/166/169/173/311/336/340/388/401/404/514/659/660, 138/173/207/311/336/340/388/401/404/514/659/660/670, 138/166/173/311/388/401/404/514/659/660, 138/173/207/311/336/340/388/401/404/419/514/659/660/670, 138/173/207/311/382/388/401/404/419/514/659/660/670, 138/173/207/311/336/340/382/388/401/404/514/659/660, 138/173/311/336/340/388/401/404/514/659/660/670, 138/173/311/340/388/401/404/514/659/660/670, 138/173/311/336/388/401/404/514/659/660/670, 138/173/311/336/340/382/388/401/404/514/659/660, 127/138/141/173/207/311/340/382/388/401/404/514/659/660/670, 138/173/207/311/340/382/388/401/404/419/514/659/660/670, 138/173/311/336/340/388/401/404/419/514/659/660/670, 138/166/168/173/207/311/388/401/404/419/514/659/660/670, 138/166/173/311/336/388/401/404/514/659/660, or 138/173/207/311/388/401/404/514/659/660/670, wherein the amino acid positions are relative to the reference sequence corresponding to residues 8 to 890 of SEQ ID NO: 2, or relative to the reference sequence corresponding to SEQ ID NO: 2.

[0146] In some embodiments, the amino acid sequence of the engineered RNA polymerase comprises at least a substitution set, or amino acid residues 138R/173Y/207S/311G/336S/340W/388K/401R/404L/514S/659R/660H, 138R/173Y/311G/336S/340W/388K/401R/404L/419R/514S/659R/660H, 138R/173Y/207S/311G/388K/401R/404L/514S/659R/660H, 138R/166R/169L/173Y/311G/336S/340W/388K/401R/404L/514S/659R/660H, 138R/173Y/207S/311G/336S/340W/388K/401R/404L/514S/659R/660H/670R, 138R/166R/173Y/311G/388K/401R/404L/514S/659R/660H, 138R/173Y/207S/311G/336S/340W/388K/401R/404L/419R/514S/659R/660H/670R, 138R/173Y/207S/311G/382G/388K/401R/404L/419R/514S/659R/660H/670R, 138R/173Y/207S/311G/336S/340W/382G/388K/401R/404L/514S/659R/660H, 138R/173Y/311G/336S/340W/388K/401R/404L/514S/659R/660H/670R, 138R/173Y/311G/340W/388K/401R/404L/514S/659R/660H/670R, 138R/173Y/311G/336S/388K/401R/404L/514S/659R/660H/670R, 138R/173Y/311G/336S/340W/382G/388K/401R/404L/514S/659R/660H, 127G/138R/141A/173Y/207S/311G/340W/382G/388K/401R/404L/514S/659R/660H/670R, 138R/173Y/207S/311G/340W/382G/388K/401R/404L/419R/514S/659R/660H/670R, 138R/173Y/311G/336S/340W/388K/401R/404L/419R/514S/659R/660H/670R, 138R/166R/168V/173Y/207S/311G/388K/401R/404L/419R/514S/659R/660H/670R, 138R/166V/173Y/311G/336S/388K/401R/404L/514S/659R/660H, or 138R/173Y/207S/311G/388K/401R/404L/514S/659R/660H/670R, wherein the amino acid positions are relative to the reference sequence corresponding to residues 8 to 890 of SEQ ID NO: 2, or relative to the reference sequence corresponding to SEQ ID NO: 2.

[0147] In some embodiments, the amino acid sequence of the engineered RNA polymerase comprises at least a substitution set at amino acid positions 38/138/173/311/336/340/388/401/404/437/514/659/660/779, 38/138/173/311/336/340/388/401/404/437/514/659/660, 38/138/173/311/336/340/388/401/404/514/659/660, 38/138/173/207/311/336/340/388/401/404/437/514/659/660/779, 138/173/311/336/340/388/401/404/514/517/659/660/779, 38/138/173/311/336/340/388/401/404/437/514/527/659/660/664, 38/138/173/207/311/336/340/379/388/401/404/437/514/659/660, 138/173/311/336/340/388/401/404/514/659/660/664/670/779, 38/138/173/311/336/340/388/401/404/514/659/660/779, 38/138/173/311/336/340/388/401/404/437/514/517/659/660, 138/173/311/336/340/388/401/404/437/514/659/660/779, 38/138/173/311/336/340/388/401/404/437/514/607/659/660, 38/138/173/311/336/340/379/388/401/404/514/659/660/779, or 138/173/311/336/340/388/401/404/514/517/659/660/670/779, wherein the amino acid positions are relative to the reference sequence corresponding to residues 8 to 890 of SEQ ID NO: 2, or relative to the reference sequence corresponding to SEQ ID NO: 2.

[0148] In some embodiments, the amino acid sequence of the engineered RNA polymerase comprises at least a substitution set, or amino acid residues 38G/138R/173Y/311G/336S/340W/388K/401R/404L/437P/514S/659R/660H/779R, 38G/138R/173Y/311G/336S/340W/388K/401R/404L/437P/514S/659R/660H, 38G/138R/173Y/311G/336S/340W/388K/401R/404L/514S/659R/660H, 38G/138R/173Y/207S/311G/336S/340W/388K/401R/404L/437P/514S/659R/660H/779R, 138R/173Y/311G/336S/340W/388K/401R/404L/514S/517R/659R/660H/779R, 38G/138R/173Y/311G/336S/340W/388K/401R/404L/437P/514S/527E/659R/660H/664K, 38G/138R/173Y/207S/311G/336S/340W/379S/388K/401R/404L/437P/514S/659R/660H, 138R/173Y/311G/336S/340W/388K/401R/404L/514S/659R/660H/664K/670R/779R, 38G/138R/173Y/311G/336S/340W/388K/401R/404L/514S/659R/660H/779R, 38G/138R/173Y/311G/336S/340W/388K/401R/404L/437P/514S/517R/659R/660H, 138R/173Y/311G/336S/340W/388K/401R/404L/437P/514S/659R/660H/779R, 38G/138R/173Y/311G/336S/340W/388K/401R/404L/437P/514S/607Y/659R/660H, 38G/138R/173Y/311G/336S/340W/379S/388K/401R/404L/514S/659R/660H/779R, 138R/173Y/311G/336S/340W/388K/401R/404L/514S/517R/659R/660H/670R/779R, 38G/138R/173Y/311G/336S/340W/388K/401R/404L/437P/514S/659R/660H/779R, 38G/138R/173Y/311G/336S/340W/388K/401R/404L/437P/514S/659R/660H, 38G/138R/173Y/311G/336S/340W/388K/401R/404L/514S/659R/660H, 38G/138R/173Y/207S/311G/336S/340W/388K/401R/404L/437P/514S/659R/660H/779R, 138R/173Y/311G/336S/340W/388K/401R/404L/514S/517R/659R/660H/779R, 38G/138R/173Y/311G/336S/340W/388K/401R/404L/437P/514S/527E/659R/660H/664K, 38G/138R/173Y/207S/311G/336S/340W/379S/388K/401R/404L/437P/514S/659R/660H, 138R/173Y/311G/336S/340W/388K/401R/404L/514S/659R/660H/664K/670R/779R, 38G/138R/173Y/311G/336S/340W/388K/401R/404L/L514S/659R/660H/779R, 38G/138R/173Y/311G/336S/340W/388K/401R/404L/437P/514S/517R/659R/660H, 138R/173Y/311G/336S/340W/388K/401R/404L/437P/514S/659R/660H/779R, 38G/138R/173Y/311G/336S/340W/388K/401R/404L/437P/514S/607Y/659R/660H, 38G/138R/173Y/311G/336S/340W/379S/388K/401R/404L/514S/659R/660H/779R, or 138R/173Y/311G/336S/340W/388K/401R/404L/514S/517R/659R/660H/670R/779R, wherein the amino acid positions are relative to the reference sequence corresponding to residues 8 to 890 of SEQ ID NO: 2, or relative to the reference sequence corresponding to SEQ ID NO: 2.

[0149] In some embodiments, the amino acid sequence of the engineered RNA polymerase comprises at least a substitution set at amino acid positions 138/173/311/336/340/357/388/394/401/404/514/659/660/664, or 173/357/394/401/404/514/659/660/664, wherein the amino acid positions are relative to the reference sequence corresponding to residues 8 to 890 of SEQ ID NO: 2, or relative to the reference sequence corresponding to SEQ ID NO: 2.

[0150] In some embodiments, the amino acid sequence of the engineered RNA polymerase comprises at least a substitution set, or amino acid residues 138R/173Y/311G/336S/340W/357E/388K/394K/401R/404L/514S/659R/660H/664P, or 173Y/357E/394K/401R/404S/514S/659R/660H/664P, wherein the amino acid positions are relative to the reference sequence corresponding to residues 8 to 890 of SEQ ID NO: 2, or relative to the reference sequence corresponding to SEQ ID NO: 2.

[0151] In some embodiments, the amino acid sequence of the engineered RNA polymerase comprises at least a substitution set at amino acid positions 38/138/173/311/336/340/388/401/404/437/514/659/660/720/779, 38/138/173/196/311/336/340/388/401/404/437/514/659/660/779, 38/138/173/311/336/340/388/401/404/437/514/609/659/660/779, 38/138/173/246/311/336/340/388/401/404/437/514/659/660/779, 38/138/173/185/311/336/340/388/401/404/437/514/659/660/779, 38/138/173/311/336/340/388/401/404/437/514/594/659/660/779, 38/138/173/212/311/336/340/388/401/404/437/514/659/660/779, 38/138/173/311/336/340/388/401/404/437/494/514/659/660/779, 38/138/173/311/336/340/375/388/401/404/437/514/659/660/779, 38/138/173/311/336/340/388/401/404/437/514/659/660/721/779, 38/72/138/173/311/336/340/388/401/404/437/514/659/660/779, 38/138/173/311/336/340/388/401/404/437/514/659/660/779/867, 38/138/160/173/311/336/340/388/401/404/437/514/659/660/779, 38/138/173/311/336/340/388/401/404/437/514/659/660/718/779, 38/138/173/187/311/336/340/388/401/404/437/514/659/660/779, 38/138/170/311/336/340/388/401/404/437/514/659/660/779, 38/138/173/311/336/340/388/401/404/437/514/615/659/660/779, 38/137/173/311/336/340/388/401/404/437/514/659/660/779, 38/138/173/311/336/340/388/401/404/437/514/659/660/779/854, 38/131/138/173/311/336/340/388/401/404/437/514/659/660/779, 138/173/185/187/311/336/340/388/401/404/514/659/660/779, 38/138/173/185/187/311/336/340/388/401/404/437/514/659/660/779, 38/138/173/311/336/340/388/401/404/514/609/659/660/779, 138/173/311/336/340/388/401/404/437/514/609/659/660/779, 138/173/185/187/311/336/340/388/401/404/514/609/659/660/779, 38/138/173/311/336/340/388/401/404/514/609/659/660/720/779, 38/138/173/185/187/311/336/340/388/401/404/437/514/609/659/660/779, 38/138/173/185/187/311/336/340/388/401/404/514/659/660/779, 38/138/173/311/336/340/388/401/404/514/659/660/721/779, 38/138/173/311/336/340/388/401/404/437/514/609/659/660/720/779, 38/138/173/185/187/246/311/336/340/388/401/404/437/514/659/660/779, or 38/138/173/185/187/311/336/340/388/401/404/514/609/659/660/720/779, wherein the amino acid positions are relative to the reference sequence corresponding to residues 8 to 890 of SEQ ID NO: 2, or relative to the reference sequence corresponding to SEQ ID NO: 2.

[0152] In some embodiments, the amino acid sequence of the engineered RNA polymerase comprises at least a substitution set, or amino acid residues 38G/138R/173Y/311G/336S/340W/388K/401R/404L/437P/514S/659R/660H/720A/779R, 38G/138R/173Y/196C/311G/336S/340W/388K/401R/404L/437P/514S/659R/660H/779R, 38G/138R/173Y/311G/336S/340W/388K/401R/404L/437P/514S/609W/659R/660H/779R, 38G/138R/173Y/196V/311G/336S/340W/388K/401R/404L/437P/514S/659R/660H/779R, 38G/138R/173Y/246V/311G/336S/340W/388K/401R/404L/437P/514S/659R/660H/779R, 38G/138R/173Y/185L/311G/336S/340W/388K/401R/404L/437P/514S/659R/660H/779R, 38G/138R/173Y/311G/336S/340W/388K/401R/404L/437P/514S/594G/659R/660H/779R, 38G/138R/173Y/212Y/311G/336S/340W/388K/401R/404L/437P/514S/659R/660H/779R, 38G/138R/173Y/311G/336S/340W/388K/401R/404L/437P/494G/514S/659R/660H/779R, 38G/138R/173Y/196A/311G/336S/340W/388K/401R/404L/437P/514S/659R/660H/779R, 38G/138R/173Y/212R/311G/336S/340W/388K/401R/404L/437P/514S/659R/660H/779R, 38G/138R/173Y/311G/336S/340W/375F/388K/401R/404L/437P/514S/659R/660H/779R, 38G/138R/173Y/311G/336S/340W/388K/401R/404L/437P/514S/659R/660H/721T/779R, 38G/138R/173Y/311G/336S/340W/388K/401R/404L/437P/514S/659R/660H/721A/779R, 38G/72R/138R/173Y/311G/336S/340W/388K/401R/404L/437P/514S/659R/660H/779R, 38G/138R/173Y/185I/311G/336S/340W/388K/401R/404L/437P/514S/659R/660H/779R, 38G/138R/173Y/311G/336S/340W/388K/401R/404L/437P/514S/659R/660H/721S/779R, 38G/138R/173Y/311G/336S/340W/388K/401R/404L/437P/514S/659R/660H/779R/867Q, 38G/138R/173Y/311G/336S/340W/388K/401R/404L/437P/514S/659R/660H/721Y/779R, 38G/138R/160F/173Y/311G/336S/340W/388K/401R/404L/437P/514S/659R/660H/779R, 38G/138R/173Y/311G/336S/340W/388K/401R/404L/437P/514S/659R/660H/718F/779R, 38G/138R/173Y/311G336S/K340W/388K/401R/404L/437P/514S/609F/659R/660H/779R, 38G/138R/173Y/311G/336S/340W/388K/401R/404L/437P/514S/659R/660H/720S/779R, 38G/138R/173Y/187L/311G/336S/340W/388K/401R/404L/437P/514S/659R/660H/779R, 38G/138R/173Y/311G/336S/340W/388K/401R/404L/437P/514S/659R/660H/718V/779R, 38G/138R/170L/311G/336S/340W/388K/401R/404L/437P/514S/659R/660H/779R, 38G/138R/173Y/311G/336S/340W/388K/401R/404L/437P/514S/609E/659R/660H/779R, 38G/138R/173Y/311G/336S/340W/388K/401R/404L/437P/514S/659R/660H/718S/779R, 38G/138R/173Y/311G/336S/340W/388K/401R/404L/437P/514S/609C/659R/660H/779R, 38G/138R/173Y/311G/336S/340W/388K/401R/404L/437P/514S/609P/659R/660H/779R, 38G/138R/173Y/311G/336S/340W/388K/401R/404L/437P/514S/659R/660H/721M/779R, 38G/138R/173Y/311G/336S/340W/388K/401R/404L/437P/514S/615A/659R/660H/779R, 38G/138R/173Y/187H/311G/336S/340W/388K/401R/404L/437P/514S/659R/660H/779R, 38G/138R/173Y/196S/311G/336S/340W/388K/401R/404L/437P/514S/659R/660H/779R, 38G/138R/173Y/311G/336S/340W/388K/401R/404L/437P/514S/659R/660H/721E/779R, 38G/138R/173Y/311G/336S/340W/388K/401R/404L/437P/514S/659R/660H/718Y/779R, 38G/137G/173Y/311G/336S/340W/388K/401R/404L/437P/514S/659R/660H/779R, 38G/138R/173Y/187G/311G/336S/340W/388K/401R/404L/437P/514S/659R/660H/779R, 38G/138R/173Y/311G/336S/340W/388K/401R/404L/437P/514S/659R/660H/720G/779R, 38G/138R/173Y/311G/336S/340W/388K/401R/404L/437P/514S/659R/660H/720P/779R, 38G/138R/173Y/311G/336S/340W/388K/401R/404L/437P/514S/659R/660H/779R/854T, 38G/138R/173Y/311G/336S/340W/388K/401R/404L/437P/514S/659R/660H/720I/779R, 38G/138R/160L/173Y/311G/336S/340W/388K/401R/404L/437P/514S/659R/660H/779R, 38G/131T/138R/173Y/311G/336S/340W/388K/401R/404L/437P/514S/659R/660H/779R, 138R/173Y/185L/187H/311G/336S/340W/388K/401R/404L/514S/659R/660H/779R, 38G/138R/173Y/185L/187H/311G/336S/340W/388K/401R/404L/437P/514S/659R/660H/779R, 38G/138R/173Y/185L/187L/311G/336S/340W/388K/401R/404L/437P/514S/659R/660H/779R, 38G/138R/173Y/311G/336S/340W/388K/401R/404L/514S/609C/659R/660H/779R, 138R/173Y/311G/336S/340W/388K/401R/404L/437P/514S/609P/659R/660H/779R, 138R/173Y/185L/187H/311G/336S/340W/388K/401R/404L/514S/609C/659R/660H/779R, 38G/138R/173Y/311G/336S/340W/388K/401R/404L/514S/609P/659R/660H/720A/779R, 38G/138R/173Y/185L/187L/311G/336S/340W/388K/401R/404L/437P/514S/609P/659R/660H/779R, 38G/138R/173Y/185L/187L/311G/336S/340W/388K/401R/404L/514S/659R/660H/779R, 38G/138R/173Y/185L/187H/311G/336S/340W/388K/401R/404L/514S/659R/660H/779R, 38G/138R/173Y/311G/336S/340W/388K/401R/404L/514S/609P/659R/660H/779R, 38G/138R/173Y/311G/336S/340W/388K/401R/404L/514S/659R/660H/721S/779R, 38G/138R/173Y/185L/187H/311G/336S/340W/388K/401R/404L/437P/514S/609E/659R/660H/779R, 38G/138R/173Y/311G/336S/340W/388K/401R/404L/437P/514S/609P/659R/660H/720A/779R, 38G/138R/173Y/185L/187L/246V/311G/336S/340W/388K/401R/404L/437P/514S/659R/660H/779R, or 38G/138R/173Y/185L/187H/311G/336S/340W/388K/401R/404L/514S/609P/659R/660H/720A/779R, wherein the amino acid positions are relative to the reference sequence corresponding to residues 8 to 890 of SEQ ID NO: 2, or relative to the reference sequence corresponding to SEQ ID NO: 2.

[0153] In some embodiments, the amino acid sequence of the engineered RNA polymerase comprises at least a substitution set at amino acid positions 138/173/311/336/340/357/388/394/401/404/514/659/660/664, 138/170/173/311/336/340/357/388/394/401/404/514/609/659/660/664, 38/138/173/185/187/311/336/340/357/388/394/401/404/514/609/659/660/664, 38/138/173/185/187/311/336/340/357/388/394/401/404/514/659/660/664, 38/138/170/311/336/340/357/388/394/401/404/514/659/660/664, 38/138/185/187/311/336/340/357/388/394/401/404/514/659/660/664/720, 138/170/173/185/187/311/336/340/357/388/394/401/404/514/609/659/660/664, 138/173/311/336/340/357/388/394/401/404/514/609/659/660/664, 138/170/173/185/187/311/336/340/357/388/394/401/404/514/609/659/660/664/721, 38/138/173/311/336/340/357/388/394/401/404/514/609/659/660/664, 38/138/170/173/246/311/336/340/357/388/394/401/404/514/609/659/660/664, 138/173/185/187/311/336/340/357/388/394/401/404/514/609/659/660/664/718, 38/138/173/185/187/311/336/340/357/388/394/401/404/514/609/659/660/664/718/720, 38/138/170/173/246/311/336/340/357/388/394/401/404/514/609/659/660/664/718, 138/173/311/336/340/357/388/394/401/404/514/659/660/664/720, 138/173/246/311/336/340/357/388/394/401/404/514/609/659/660/664, 38/138/173/185/187/246/311/336/340/357/388/394/401/404/514/659/660/664/720, 38/138/173/311/336/340/357/388/394/401/404/514/609/659/660/664/721, 38/138/173/311/336/340/357/388/394/401/404/514/659/660/664/721, 38/138/173/311/336/340/357/388/394/401/404/514/659/660/664/720/721, 38/138/170/173/311/336/340/357/388/394/401/404/514/609/659/660/664/718/720, 38/138/173/311/336/340/357/388/394/401/404/514/659/660/664/718, 38/138/173/185/187/311/336/340/357/388/394/401/404/514/609/659/660/664/718/721, 138/173/311/336/340/357/388/394/401/404/514/529/609/659/660/664, 38/138/173/311/336/340/357/388/394/401/404/514/609/659/660/664/718, 138/173/185/187/311/336/340/357/388/394/401/404/514/609/659/660/664/718/720, 138/173/185/187/311/336/340/357/388/394/401/404/514/609/659/660/664/718/721, 38/138/170/173/311/336/340/357/388/394/401/404/514/659/660/664/718/720/721, 138/170/173/185/187/311/336/340/357/388/394/401/404/514/659/660/664/718/720, 38/138/185/187/246/311/336/340/357/388/394/401/404/514/609/659/660/664/720, 138/173/311/336/340/357/388/394/401/404/514/609/659/660/664/718/720, 138/170/173/185/187/311/336/340/357/388/394/401/404/514/659/660/664/718/720/721, 38/138/170/246/311/336/340/357/388/394/401/404/514/609/659/660/664/718, 138/173/246/311/336/340/357/388/394/401/404/514/659/660/664/721, 38/138/173/311/336/340/357/388/394/401/404/514/659/660/664/718/720, or 38/138/173/311/336/340/357/388/394/401/404/514/609/659/660/664/718/720, wherein the amino acid positions are relative to the reference sequence corresponding to residues 8 to 890 of SEQ ID NO: 2, or relative to the reference sequence corresponding to SEQ ID NO: 2.

[0154] In some embodiments, the amino acid sequence of the engineered RNA polymerase comprises at least a substitution set or amino acid residues 138R/173Y/311G/336S/340W/357E/388K/394K/401R/404L/514S/659R/660H/664P, 138R/170L/173Y/311G/336S/340W/357E/388K/394K/401R/404L/514S/609P/659R/660H/664P, 38G/138R/173Y/185L/187L/311G/336S/340W/357E/388K/394K/401R/404L/514S/609C/659R/660H/664P, 38G/138R/173Y/185L/187H/311G/336S/340W/357E/388K/394K/401R/404L/514S/659R/660H/664P, 38G/138R/170L/311G/336S/340W/357E/388K/394K/401R/404L/514S/659R/660H/664P, 38G/138R/185L/187L/311G/336S/340W/357E/388K/394K/401R/404L/514S/659R/660H/664P/720A, 138R/170L/173Y/185L/187H/311G/336S/340W/357E/388K/394K/401R/404L/514S/609C/659R/660H/664P, 138R/173Y/311G/336S/340W/357E/388K/394K/401R/404L/514S/609E/659R/660H/664P, 138R/170L/173Y/185L/187H/311G/336S/340W/357E/388K/394K/401R/404L/514S/609C/659R/660H/664P/721S, 38G/138R/173Y/311G/336S/340W/357E/388K/394K/401R/404L/514S/609E/659R/660H/664P, 138R/170L/173Y/185L/187L/311G/336S/340W/357E/388K/394K/401R/404L/514S/609E/659R/660H/664P, 38G/138R/170L/173Y/246V/311G/336S/340W/357E/388K/394K/401R/404L/514S/609P/659R/660H/664P, 138R/173Y/185L/187H/311G/336S/340W/357E/388K/394K/401R/404L/514S/609E/659R/660H/664P/718S, 38G/138R/173Y/185L/187L/311G/336S/340W/357E/388K/394K/401R/404L/514S/609W/659R/660H/664P/718N/720A, 38G/138R/170L/173Y/246V/311G/336S/340W/357E/388K/394K/401R/404L/514S/609C/659R/660H/664P/718S, 138R/173Y/311G/336S/340W/357E/388K/394K/401R/404L/514S/659R/660H/664P/720A, 138R/173Y/246V/311G/336S/340W/357E/388K/394K/401R/404L/514S/609E/659R/660H/664P, 38G/138R/173Y/185L/187L/246V/311G/336S/340W/357E/388K/394K/401R/404L/514S/659R/660H/664P/720A, 38G/138R/173Y/311G/336S/340W/357E/388K/394K/401R/404L/514S/609C/659R/660H/664P/721S, 38G/138R/173Y/311G/336S/340W/357E/388K/394K/401R/404L/514S/659R/660H/664P/721S, 38G/138R/173Y/311G/336S/340W/357E/388K/394K/401R/404L/514S/659R/660H/664P/720A/721S, 38G/138R/170L/173Y/311G/336S/340W/357E/388K/394K/401R/404L/514S/609C/659R/660H/664P/718S/720A, 38G/138R/173Y/311G/336S/340W/357E/388K/394K/401R/404L/514S/659R/660H/664P/718S, 38G/138R/170L/173Y/246V/311G/336S/340W/357E/388K/394K/401R/404L/514S/609P/659R/660H/664P/718S, 38G/138R/173Y/185L/187L/311G/336S/340W/357E/388K/394K/401R/404L/514S/609P/659R/660H/664P/718S/721S, 138R/173Y/311G/336S/340W/357E/388K/394K/401R/404L/514S/529R/609E/659R/660H/664P, 38G/138R/173Y/311G/336S/340W/357E/388K/394K/401R/404L/514S/609P/659R/660H/664P/718S, 138R/173Y/185L/187L/311G/336S/340W/357E/388K/394K/401R/404L/514S/609C/659R/660H/664P/718S/720A, 138R/173Y/185L/187H/311G/336S/340W/357E/388K/394K/401R/404L/514S/609C/659R/660H/664P/718S/721S, 38G/138R/170L/173Y/311G/336S/340W/357E/388K/394K/401R/404L/514S/659R/660H/664P/718S/720A/721S, 138R/170L/173Y/185L/187L/311G/336S/340W/357E/388K/394K/401R/404L/514S/659R/660H/664P/718S/720A, 38G/138R/185L/187L/246V/311G/336S/340W/357E/388K/394K/401R/404L/514S/609E/659R/660H/664P/720A, 138R/173Y/311G/336S/340W/357E/388K/394K/401R/404L/514S/609E/659R/660H/664P/718S/720A, 138R/170L/173Y/185L/187H/311G/336S/340W/357E/388K/394K/401R/404L/514S/659R/660H/664P/718S/720A/721S, 38G/138R/170L/246V/311G/336S/340W/357E/388K/394K/401R/404L/514S/609E/659R/660H/664P/718S, 138R/173Y/246V/311G/336S/340W/357E/388K/394K/401R/404L/514S/659R/660H/664P/721S, 38G/138R/173Y/311G/336S/340W/357E/388K/394K/401R/404L/514S/659R/660H/664P/718S/720A, or 38G/138R/173Y/311G/336S/340W/357E/388K/394K/401R/404L/514S/609E/659R/660H/664P/718S/720A, wherein the amino acid positions are relative to the reference sequence corresponding to residues 8 to 890 of SEQ ID NO: 2, or relative to the reference sequence corresponding to SEQ ID NO: 2.

[0155] In some embodiments, the amino acid sequence of the engineered RNA polymerase comprises at least a substitution set at amino acid positions 38/138/143/173/311/336/340/388/401/404/514/659/660, 38/105/138/173/311/336/340/388/401/404/514/659/660, 38/138/173/311/336/340/388/401/404/514/659/660/775/779, 38/135/138/173/311/336/340/388/401/404/514/659/660, 38/100/138/173/311/336/340/388/401/404/514/659/660, 38/138/173/246/311/336/340/388/401/404/514/659/660, 38/138/173/311/336/340/388/401/404/514/659/660/779/782, 38/138/173/311/336/340/388/401/404/514/659/660/749, 38/138/173/237/311/336/340/388/401/404/514/659/660, 38/138/162/173/311/336/340/388/401/404/514/659/660, 38/83/138/173/311/336/340/388/401/404/514/659/660, 38/138/173/218/311/336/340/388/401/404/514/659/660, 38/138/173/227/311/336/340/388/401/404/514/659/660, 38/115/138/173/311/336/340/388/401/404/514/659/660, 38/138/173/274/311/336/340/388/401/404/514/659/660, 38/81/138/173/311/336/340/388/401/404/514/659/660, 38/122/138/173/311/336/340/388/401/404/514/659/660, 38/61/138/173/311/336/340/388/401/404/514/659/660, 32/38/138/173/311/336/340/388/401/404/514/659/660, 38/138/139/173/311/336/340/388/401/404/514/659/660, 38/75/138/173/311/336/340/388/401/404/514/659/660, 38/138/173/239/311/336/340/388/401/404/514/659/660, 38/138/173/257/311/336/340/388/401/404/514/659/660, 38/138/173/240/311/336/340/388/401/404/514/659/660, 38/69/138/161/173/311/336/340/388/401/404/514/659/660, 38/138/173/253/311/336/340/388/401/404/514/659/660, 14/38/138/173/311/336/340/388/401/404/514/659/660, 38/138/173/221/311/336/340/388/401/404/514/659/660, 38/84/138/173/311/336/340/388/401/404/514/659/660, 38/133/138/150/173/311/336/340/388/401/404/514/659/660, 38/60/138/173/311/336/340/388/401/404/514/659/660, 38/138/173/275/311/336/340/388/401/404/514/659/660, 38/89/138/173/311/336/340/388/401/404/514/659/660, 15/38/138/173/311/336/340/388/401/404/514/659/660, 38/138/173/254/311/336/340/388/401/404/514/659/660, 38/138/173/311/336/340/388/401/404/514/625/659/660, 14/38/67/138/173/311/336/340/388/401/404/514/659/660, 21/38/138/173/311/336/340/388/401/404/514/659/660, 38/93/138/173/311/336/340/388/401/404/514/659/660, 38/138/173/250/311/336/340/388/401/404/514/659/660, 38/138/173/217/311/336/340/388/401/404/514/659/660, 19/38/138/173/311/336/340/388/401/404/514/659/660, 38/95/138/173/311/336/340/388/401/404/514/659/660, 38/138/173/311/336/340/388/401/404/514/659/660/759, 38/62/138/173/311/336/340/388/401/404/514/659/660, or 38/138/140/173/311/336/340/388/401/404/514/659/660, wherein the amino acid positions are relative to the reference sequence corresponding to residues 8 to 890 of SEQ ID NO: 2, or relative to the reference sequence corresponding to SEQ ID NO: 2.

[0156] In some embodiments, the amino acid sequence of the engineered RNA polymerase comprises at least a substitution set or amino acid residues 38G/138R/143N/173Y/311G/336S/340W/388K/401R/404L/514S/659R/660H, 38G/138R/143Q/173Y/311G/336S/340W/388K/401R/404L/514S/659R/660H, 38G/138R/143R/173Y/311G/336S/340W/388K/401R/404L/514S/659R/660H, 38G/105R/138R/173Y/311G/336S/340W/388K/401R/404L/514S/659R/660H, 38G/138R/173Y/311G/336S/340W/388K/401R/404L/514S/659R/660H/775R/779R, 38G/135K/138R/173Y/311G/336S/340W/388K/401R/404L/514S/659R/660H, 38G/100R/138R/173Y/311G/336S/340W/388K/401R/404L/514S/659R/660H, 38G/138R/173Y/311G/336S/340W/388K/401R/404L/514S/659R/660H/775K/779R, 38G/138R/173Y/246K/311G/336S/340W/388K/401R/404L/514S/659R/660H, 38G/138R/173Y/311G/336S/340W/388K/401R/404L/514S/659R/660H/779R/782R, 38G/138R/173Y/311G/336S/340W/388K/401R/404L/514S/659R/660H/749R, 38G/138R/173Y/237L/311G/336S/340W/388K/401R/404L/514S/659R/660H, 38G/138R/162V/173Y/311G/336S/340W/388K/401R/404L/514S/659R/660H, 38G/83K/138R/173Y/311G/336S/340W/388K/401R/404L/514S/659R/660H, 38G/138R/173Y/218T/311G/336S/340W/388K/401R/404L/514S/659R/660H, 38G/138R/173Y/227V/311G/336S/340W/388K/401R/404L/514S/659R/660H, 38G/115L/138R/173Y/311G/336S/340W/388K/401R/404L/514S/659R/660H, 38G/138R/173Y/274G/311G/336S/340W/388K/401R/404L/514S/659R/660H, 38G/81C/138R/173Y/311G/336S/340W/388K/401R/404L/514S/659R/660H, 38G/122I/138R/173Y/311G/336S/340W/388K/401R/404L/514S/659R/660H, 38G/61Y/138R/173Y/311G/336S/340W/388K/401R/404L/514S/659R/660H, 32S/38G/138R/173Y/311G/336S/340W/388K/401R/404L/514S/659R/660H, 38G/138R/139R/173Y/311G/336S/340W/388K/401R/404L/514S/659R/660H, 38G/75Y/138R/173Y/311G/336S/340W/388K/401R/404L/514S/659R/660H, 38G/138R/173Y/239R/311G/336S/340W/388K/401R/404L/514S/659R/660H, 38G/138R/173Y/257L/311G/336S/340W/388K/401R/404L/514S/659R/660H, 38G/138R/173Y/240M/311G/336S/340W/388K/401R/404L/514S/659R/660H, 38G/69S/138R/161R/173Y/311G/336S/340W/388K/401R/404L/514S/659R/660H, 38G/138R/173Y/253Y/311G/336S/340W/388K/401R/404L/514S/659R/660H, 14Y/38G/138R/173Y/311G/336S/340W/388K/401R/404L/514S/659R/660H, 38G/138R/173Y/221C/311G/336S/340W/388K/401R/404L/514S/659R/660H, 38G/84A/138R/173Y/311G/336S/340W/388K/401R/404L/514S/659R/660H, 38G/115V/138R/173Y/311G/336S/340W/388K/401R/404L/514S/659R/660H, 38G/133C/138R/150Q/173Y/311G/336S/340W/388K/401R/404L/514S/659R/660H, 38G/60L/138R/173Y/311G/336S/340W/388K/401R/404L/514S/659R/660H, 38G/60G/138R/173Y/311G/336S/340W/388K/401R/404L/514S/659R/660H, 32V/38G/138R/173Y/311G/336S/340W/388K/401R/404L/514S/659R/660H, 38G/138R/173Y/275A/311G/336S/340W/388K/401R/404L/514S/659R/660H, 38G/89Q/138R/173Y/311G/336S/340W/388K/401R/404L/514S/659R/660H, 38G/138R/173Y/257V/311G/336S/340W/388K/401R/404L/514S/659R/660H, 38G/138R/173Y/274L/311G/336S/340W/388K/401R/404L/514S/659R/660H, 15T/38G/138R/173Y/311G/336S/340W/388K/401R/404L/514S/659R/660H, 38G/138R/173Y/254S/311G/336S/340W/388K/401R/404L/514S/659R/660H, 38G/61W/138R/173Y/311G/336S/340W/388K/401R/404L/514S/659R/660H, 38G/138R/173Y/311G/336S/340W/388K/401R/404L/514S/625C/659R/660H, 14Q/38G/67R/138R/173Y/311G/336S/340W/388K/401R/404L/514S/659R/660H, 21G/38G/138R/173Y/311G/336S/340W/388K/401R/404L/514S/659R/660H, 38G/138R/173Y/254G/311G/336S/340W/388K/401R/404L/514S/659R/660H, 38G/93Y/138R/173Y/311G/336S/340W/388K/401R/404L/514S/659R/660H, 38G/138R/173Y/250R/311G/336S/340W/388K/401R/404L/514S/659R/660H, 38G/138R/173Y/217V/311G/336S/340W/388K/401R/404L/514S/659R/660H, 38G/60M/138R/173Y/311G/336S/340W/388K/401R/404L/514S/659R/660H, 38G/138R/173Y/239L/311G/336S/340W/388K/401R/404L/514S/659R/660H, 38G/75S/138R/173Y/311G/336S/340W/388K/401R/404L/514S/659R/660H, 32T/38G/138R/173Y/311G/336S/340W/388K/401R/404L/514S/659R/660H, 19E/38G/138R/173Y/311G/336S/340W/388K/401R/404L/514S/659R/660H, 38G/95Y/138R/173Y/311G/336S/340W/388K/401R/404L/514S/659R/660H, 38G/81L/138R/173Y/311G/336S/340W/388K/401R/404L/514S/659R/660H, 38G/60R/138R/173Y/311G/336S/340W/388K/401R/404L/514S/659R/660H, 38G/138R/173Y/311G/336S/340W/388K/401R/404L/514S/659R/660H/759M, 38G/62T/138R/173Y/311G/336S/340W/388K/401R/404L/514S/659R/660H, or 38G/138R/140R/173Y/311G/336S/340W/388K/401R/404L/514S/659R/660H, wherein the amino acid positions are relative to the reference sequence corresponding to residues 8 to 890 of SEQ ID NO: 2, or relative to the reference sequence corresponding to SEQ ID NO: 2.

[0157] In some embodiments, the amino acid sequence of the engineered RNA polymerase comprises at least a substitution set at amino acid positions 38/138/170/311/336/340/357/388/394/401/404/514/609/659/660/664/779, 38/138/170/246/311/336/340/357/388/394/401/404/514/609/659/660/664, 38/138/170/246/311/336/340/357/388/394/401/404/514/659/660/664, 38/138/170/311/336/340/357/388/394/401/404/514/609/659/660/664/775/779, 38/105/138/170/311/336/340/357/388/394/401/404/514/659/660/664, 38/138/143/170/311/336/340/357/388/394/401/404/514/609/659/660/664/775, 38/105/135/138/170/311/336/340/357/388/394/401/404/514/609/659/660/664/775, 38/111/138/170/311/336/340/357/388/394/401/404/514/609/659/660/664, or 38/138/170/311/336/340/357/388/394/401/404/514/609/659/660/664, wherein the amino acid positions are relative to the reference sequence corresponding to residues 8 to 890 of SEQ ID NO: 2, or relative to the reference sequence corresponding to SEQ ID NO: 2.

[0158] In some embodiments, the amino acid sequence of the engineered RNA polymerase comprises at least a substitution set or amino acid residue 38G/138R/170L/311G/336S/340W/357E/388K/394K/401R/404L/514S/609E/659R/660H/664P/779R, 38G/138R/170L/246K/311G/336S/340W/357E/388K/394K/401R/404L/514S/609E/659R/660H/664P, 38G/138R/170L/246K/311G/336S/340W/357E/388K/394K/401R/404L/514S/659R/660H/664P, 38G/138R/170L/311G/336S/340W/357E/388K/394K/401R/404L/514S/609E/659R/660H/664P/775K/779R, 38G/105R/138R/170L/311G/336S/340W/357E/388K/394K/401R/404L/514S/659R/660H/664P, 38G/138R/143N/170L/311G/336S/340W/357E/388K/394K/401R/404L/514S/609E/659R/660H/664P/775K, 38G/105R/135K/138R/170L/311G/336S/340W/357E/388K/394K/401R/404L/514S/609E/659R/660H/664P/775K, 38G/111K/138R/170L/311G/336S/340W/357E/388K/394K/401R/404L/514S/609E/659R/660H/664P, or 38G/138R/170L/311G/336S/340W/357E/388K/394K/401R/404L/514S/609E/659R/660H/664P, wherein the amino acid positions are relative to the reference sequence corresponding to residues 8 to 890 of SEQ ID NO: 2, or relative to the reference sequence corresponding to SEQ ID NO: 2.

[0159] In some embodiments, the amino acid sequence of the engineered RNA polymerase comprises at least a substitution set at amino acid positions 32/38/138/170/246/311/336/340/357/388/394/401/404/514/609/659/660/664, 38/138/170/246/311/336/340/357/388/394/401/404/514/531/533/609/659/660/664, 38/115/138/170/246/311/336/340/357/388/394/401/404/514/609/659/660/664, 38/83/138/170/246/311/336/340/357/388/394/401/404/514/609/659/660/664, 32/38/60/61/138/170/246/311/336/340/357/388/394/401/404/514/609/659/660/664, 38/55/138/170/246/311/336/340/357/388/394/401/404/514/609/659/660/664, 38/138/170/246/311/336/340/357/388/394/401/404/514/589/609/659/660/664, 38/138/170/246/311/336/340/357/388/394/401/404/514/609/659/660/664, 38/138/170/246/311/336/340/357/388/394/401/404/514/609/617/659/660/664, 38/138/170/172/246/311/336/340/357/388/394/401/404/514/609/659/660/664, 38/138/170/246/311/336/340/357/388/394/401/404/514/598/609/659/660/664, 38/56/138/170/193/246/311/336/340/357/388/394/401/404/514/609/659/660/664, 38/56/138/170/246/311/336/340/357/388/394/401/404/514/609/659/660/664, 38/138/170/246/311/336/340/357/388/394/401/404/514/536/609/659/660/664, 38/52/138/170/246/311/336/340/357/388/394/401/404/514/609/659/660/664, 17/38/138/170/246/311/336/340/357/388/394/401/404/514/609/659/660/664, 38/138/170/246/261/311/336/340/357/388/394/401/404/514/609/659/660/664, 38/78/138/170/246/311/336/340/357/388/394/401/404/514/609/659/660/664, 38/138/170/246/311/336/340/357/388/394/401/404/514/609/629/659/660/664, 38/63/138/170/246/311/336/340/357/388/394/401/404/514/609/659/660/664, 38/82/138/170/246/311/336/340/357/388/394/401/404/514/609/659/660/664, 38/138/170/207/246/311/336/340/357/388/394/401/404/514/609/659/660/664, 38/138/170/246/311/336/340/357/388/394/401/404/514/609/659/660/664/666, 38/138/150/170/246/311/336/340/357/388/394/401/404/514/609/659/660/664, 38/45/138/170/246/311/336/340/357/388/394/401/404/514/609/659/660/664, 38/135/138/170/246/311/336/340/357/388/394/401/404/514/609/659/660/664, 13/38/138/170/246/311/336/340/357/388/394/401/404/514/609/659/660/664, 33/38/138/170/246/311/336/340/357/388/394/401/404/514/609/659/660/664, or 38/138/170/245/246/311/336/340/357/388/394/401/404/514/609/659/660/664, wherein the amino acid positions are relative to the reference sequence corresponding to residues 8 to 890 of SEQ ID NO: 2, or relative to the reference sequence corresponding to SEQ ID NO: 2.

[0160] In some embodiments, the amino acid sequence of the engineered RNA polymerase comprises at least a substitution set or amino acid residues 32V/38G/138R/170L/246K/311G/336S/340W/357E/388K/394K/401R/404L/514S/609E/659R/660H/664P, 38G/138R/170L/246K/311G/336S/340W/357E/388K/394K/401R/404L/514S/531Q/533S/609E/659R/660H/664P, 38G/115L/138R/170L/246K/311G/336S/340W/357E/388K/394K/401R/404L/514S/609E/659R/660H/664P, 38G/83K/138R/170L/246K/311G/336S/340W/357E/388K/394K/401R/404L/514S/609E/659R/660H/664P, 32V/38G/60M/61W/138R/170L/246K/311G/336S/340W/357E/388K/394K/401R/404L/514S/609E/659R/660H/664P, 38G/55D/138R/170L/246K/311G/336S/340W/357E/388K/394K/401R/404L/514S/609E/659R/660H/664P, 38G/138R/170L/246K/311G/336S/340W/357E/388K/394K/401R/404L/514S/589C/609E/659R/660H/664P, 38G/138R/170L/246K/311G/336S/340W/357P/388K/394K/401R/404L/514S/609E/659R/660H/664P, 38G/138R/170L/246K/311G/336S/340W/357E/388K/394K/401R/404L/514S/609E/617R/659R/660H/664P, 38G/138R/170L/172G/246K/311G/336S/340W/357E/388K/394K/401R/404L/514S/609E/659R/660H/664P, 38G/138R/170L/246K/311G/336S/340W/357E/388K/394K/401R/404L/514S/598A/609E/659R/660H/664P, 38G/56G/138R/170L/193G/246K/311G/336S/340W/357E/388K/394K/401R/404L/514S/609E/659R/660H/664P, 38G/56T/138R/170L/246K/311G/336S/340W/357E/388K/394K/401R/404L/514S/609E/659R/660H/664P, 38G/138R/170L/246K/311G/336S/340W/357E/388K/394K/401R/404L/514S/536V/609E/659R/660H/664P, 38G/52T/138R/170L/246K/311G/336S/340W/357E/388K/394K/401R/404L/514S/609E/659R/660H/664P, 17N/38G/138R/170L/246K/311G/336S/340W/357E/388K/394K/401R/404L/514S/609E/659R/660H/664P, 38G/56N/138R/170L/246K/311G/336S/340W/357E/388K/394K/401R/404L/514S/609E/659R/660H/664P, 38G/138R/170L/246K/311G/336S/340W/357E/388K/394K/401R/404L/514S/598K/609E/659R/660H/664P, 38G/138R/170L/246K/261M/311G/336S/340W/357E/388K/394K/401R/404L/514S/609E/659R/660H/664P, 38G/56E/138R/170L/246K/311G/336S/340W/357E/388K/394K/401R/404L/514S/609E/659R/660H/664P, 38G/55S/138R/170L/246K/311G/336S/340W/357E/388K/394K/401R/404L/514S/609E/659R/660H/664P, 38G/138R/170L/246K/311G/336S/340W/357E/388K/394K/401R/404L/514S/536E/609E/659R/660H/664P, 38G/138R/170L/246K/311G/336S/340W/357E/388K/394K/401R/404L/514S/598L/609E/659R/660H/664P, 38G/78S/138R/170L/246K/311G/336S/340W/357E/388K/394K/401R/404L/514S/609E/659R/660H/664P, 38G/56V/138R/170L/246K/311G/336S/340W/357E/388K/394K/401R/404L/514S/609E/659R/660H/664P, 38G/138R/170L/246K/311G/336S/340W/357E/388K/394K/401R/404L/514S/609E/629R/659R/660H/664P, 38G/138R/170L/246K/311G/336S/340W/357E/388K/394K/401R/404L/514S/598R/609E/659R/660H/664P, 38G/63S/138R/170L/246K/311G/336S/340W/357E/388K/394K/401R/404L/514S/609E/659R/660H/664P, 38G/82S/138R/170L/246K/311G/336S/340W/357E/388K/394K/401R/404L/514S/609E/659R/660H/664P, 38G/138R/170L/207S/246K/311G/336S/340W/357E/388K/394K/401R/404L/514S/609E/659R/660H/664P, 38G/138R/170L/246K/311G/336S/340W/357E/388K/394K/401R/404L/514S/598V/609E/659R/660H/664P, 38G/138R/170L/246K/311G/336S/340W/357E/388K/394K/401R/404L/514S/609E/659R/660H/664P/666M, 38G/138R/150Y/170L/246K/311G/336S/340W/357E/388K/394K/401R/404L/514S/609E/659R/660H/664P, 38G/45K/138R/170L/246K/311G/336S/340W/357E/388K/394K/401R/404L/514S/609E/659R/660H/664P, 38G/55W/138R/170L/246K/311G/336S/340W/357E/388K/394K/401R/404L/514S/609E/659R/660H/664P, 38G/135G/138R/170L/246K/311G/336S/340W/357E/388K/394K/401R/404L/514S/609E/659R/660H/664P, 13N/38G/138R/170L/246K/311G/336S/340W/357E/388K/394K/401R/404L/514S/609E/659R/660H/664P, 33E/38G/138R/170L/246K/311G/336S/340W/357E/388K/394K/401R/404L/514S/609E/659R/660H/664P, or 38G/138R/170L/245C/246K/311G/336S/340W/357E/388K/394K/401R/404L/514S/609E/659R/660H/664P, wherein the amino acid positions are relative to the reference sequence corresponding to residues 8 to 890 of SEQ ID NO: 2, or relative to the reference sequence corresponding to SEQ ID NO: 2.

[0161] In some embodiments, the amino acid sequence of the engineered RNA polymerase comprises at least a substitution set at amino acid positions 32/38/138/170/207/245/246/311/336/340/357/388/394/401/404/514/609/629/659/660/664, 17/32/38/56/138/150/170/246/311/336/340/357/388/394/401/404/514/598/609/659/660/664, 32/38/56/138/170/246/311/336/340/357/388/394/401/404/514/609/629/659/660/664, 32/38/138/170/246/311/336/340/357/388/394/401/404/514/536/609/659/660/664, 32/38/138/170/185/246/311/336/340/357/388/394/401/404/514/609/659/660/664, 32/38/56/138/150/170/246/311/336/340/357/388/394/401/404/514/609/659/660/664, 17/32/38/56/138/150/170/207/245/246/311/336/340/357/388/394/401/404/514/598/609/617/629/659/660/664, 32/38/56/138/150/170/246/311/336/340/357/388/394/401/404/514/536/598/609/659/660/664, 32/38/56/138/170/246/311/336/340/357/388/394/401/404/514/536/609/659/660/664, 32/38/138/170/185/246/311/336/340/357/388/394/401/404/514/609/659/660/664/666, 32/38/138/150/170/246/311/336/340/357/388/394/401/404/514/609/659/660/664, or 32/38/138/143/150/170/246/311/336/340/357/388/394/401/404/514/609/659/660/664/782, wherein the amino acid positions are relative to the reference sequence corresponding to residues 8 to 890 of SEQ ID NO: 2, or relative to the reference sequence corresponding to SEQ ID NO: 2.

[0162] In some embodiments, the amino acid sequence of the engineered RNA polymerase comprises at least a substitution set or amino acid residues 32V/38G/138R/170L/207S/245C/246K/311G/336S/340W/357E/388K/394K/401R/404L/514S/609E/629R/659R/660H/664P, 17N/32V/38G/56E/138R/150Y/170L/246K/311G/336S/340W/357E/388K/394K/401R/404L/514S/598A/609E/659R/660H/664P, 32V/38G/56E/138R/170L/246K/311G/336S/340W/357E/388K/394K/401R/404L/514S/609E/629R/659R/660H/664P, 32V/38G/138R/170L/246K/311G/336S/340W/357E/388K/394K/401R/404L/514S/536V/609E/659R/660H/664P, 32V/38G/138R/170L/185P/246K/311G/336S/340W/357E/388K/394K/401R/404L/514S/609E/659R/660H/664P, 32V/38G/56T/138R/150Y/170L/246K/311G/336S/340W/357E/388K/394K/401R/404L/514S/609E/659R/660H/664P, 17N/32V/38G/56E/138R/150Y/170L/207S/245C/246K/311G/336S/340W/357E/388K/394K/401R/404L/514S/598A/609E/617R/629R/659R/660H/664P, 32V/38G/56E/138R/150Y/170L/246K/311G/336S/340W/357E/388K/394K/401R/404L/514S/536V/598K/609E/659R/660H/664P, 32V/38G/56V/138R/170L/246K/311G/336S/340W/357E/388K/394K/401R/404L/514S/536V/609E/659R/660H/664P, 32V/38G/138R/170L/185P/246K/311G/336S/340W/357E/388K/394K/401R/404L/514S/609E/659R/660H/664P/666M, 32V/38G/138R/150Y/170L/246K/311G/336S/340W/357E/388K/394K/401R/404L/514S/609E/659R/660H/664P, or 32V/38G/138R/143N/150Y/170L/246V/311G/336S/340W/357E/388K/394K/401R/404L/514S/609E/659R/660H/664P/782V, wherein the amino acid positions are relative to the reference sequence corresponding to residues 8 to 890 of SEQ ID NO: 2, or relative to the reference sequence corresponding to SEQ ID NO: 2.

[0163] In some embodiments, the amino acid sequence of the engineered RNA polymerase comprises at least a substitution set at amino acid positions 32/38/56/138/143/170/246/311/336/340/357/388/394/401/404/514/609/629/659/660/664, 32/38/56/138/170/246/311/336/340/357/388/394/401/404/424/514/609/629/648/659/660/664/782, 32/38/56/138/170/246/311/336/340/357/388/394/401/404/514/609/629/660/664/782, 32/38/56/138/150/170/246/311/336/340/357/388/394/401/404/514/609/659/660/664/782, 32/38/56/138/170/246/311/336/340/357/388/394/401/404/514/609/629/659/660/664/721/782, 32/38/56/138/170/246/311/336/340/357/388/394/401/404/514/609/629/659/660/664/782, 32/38/56/138/170/196/246/311/336/340/357/388/394/401/404/514/609/629/660/664/782, or 32/38/56/138/170/246/311/336/340/357/388/394/401/404/514/609/629/659/660/664/720/721/782, wherein the amino acid positions are relative to the reference sequence corresponding to residues 8 to 890 of SEQ ID NO: 2, or relative to the reference sequence corresponding to SEQ ID NO: 2.

[0164] In some embodiments, the amino acid sequence of the engineered RNA polymerase comprises at least a substitution set or amino acid residues 32V/38G/56E/138R/143N/170L/246K/311G/336S/340W/357E/388K/394K/401R/404L/514S/609E/629R/659R/660H/664P, 32V/38G/56E/138R/170L/246R/311G/336S/340W/357E/388K/394K/401R/404L/424A/514S/609E/629R/648F/659R/660H/664P/782V, 32V/38G/56E/138R/170L/246R/311G/336S/340W/357E/388K/394K/401R/404L/514S/609E/629R/660H/664P/782V, 32V/38G/56T/138R/150Y/170L/246K/311G/336S/340W/357E/388K/394K/401R/404L/514S/609E/659R/660W/664P/782V, 32V/38G/56E/138R/170L/246K/311G/336S/340W/357E/388K/394K/401R/404L/514S/609E/629R/659R/660H/664P/721T/782V, 32V/38G/56E/138R/170L/246K/311G/336S/340W/357E/388K/394K/401R/404L/514S/609E/629R/659R/660H/664P/782V, 32V/38G/56E/138R/170L/196G/246K/311G/336S/340W/357E/388K/394K/401R/404L/514S/609E/629R/660H/664P/782V, or 32V/38G/56E/138R/170L/246K/311G/336S/340W/357E/388K/394K/401R/404L/514S/609E/629R/659R/660H/664P/720S/721A/782V, wherein the amino acid positions are relative to the reference sequence corresponding to residues 8 to 890 of SEQ ID NO: 2, or relative to the reference sequence corresponding to SEQ ID NO: 2.

[0165] In some embodiments, the amino acid sequence of the engineered RNA polymerase comprises at least a substitution set at amino acid positions 32/38/56/138/143/150/170/246/311/336/340/357/388/394/401/404/514/609/660/664/782, 32/38/56/138/150/166/170/171/246/336/340/357/388/394/401/404/514/609/659/660/664, 32/38/56/138/143/150/170/246/311/336/340/357/388/394/401/404/514/609/659/660/664/721, 32/38/56/138/150/170/246/311/336/340/357/388/394/401/404/514/609/659/660/664/782, or 32/38/56/138/143/150/170/171/246/311/336/340/357/388/394/401/404/514/609/660/664/782, wherein the amino acid positions are relative to the reference sequence corresponding to residues 8 to 890 of SEQ ID NO: 2, or relative to the reference sequence corresponding to SEQ ID NO: 2.

[0166] In some embodiments, the amino acid sequence of the engineered RNA polymerase comprises at least a substitution set or amino acid residues 32V/38G/56T/138R/143N/150Y/170L/246K/311G/336S/340W/357E/388K/394K/401R/404L/514S/609E/660H/664P/782V, 32V/38G/56T/138R/150Y/166T/170L/171E/246R/336S/340W/357E/388K/394K/401R/404L/514S/609E/659R/660H/664P, 32V/38G/56T/138R/143N/150Y/170L/246K/311G/336S/340W/357E/388K/394K/401R/404L/514S/609E/659R/660H/664P/721T, 32V/38G/56T/138R/150Y/170L/246K/311G/336S/340W/357E/388K/394K/401R/404L/514S/609E/659R/660H/664P/782V, or 32V/38G/56T/138R/143N/150Y/170L/171E/246K/311G/336S/340W/357E/388K/394K/401R/404L/514S/609E/660H/664P/782V, wherein the amino acid positions are relative to the reference sequence corresponding to residues 8 to 890 of SEQ ID NO: 2, or relative to the reference sequence corresponding to SEQ ID NO: 2.

[0167] In some embodiments, the amino acid sequence of the engineered RNA polymerase comprises at least a substitution set at amino acid positions 32/38/56/138/150/170/246/311/336/340/357/367/388/394/401/404/514/609/659/660/664/782, 32/38/56/138/150/170/246/311/336/340/357/382/388/394/401/404/514/609/659/660/664/782, 32/38/56/138/150/170/246/311/336/340/357/388/394/401/404/514/609/659/660/664/670/782, 32/38/56/138/150/170/246/311/336/340/357/388/394/401/404/514/609/659/660/664/672/782, 32/38/56/138/150/170/246/311/336/340/357/388/394/401/404/514/609/659/660/664/782, 32/38/56/138/150/170/246/311/336/340/357/388/394/401/404/514/609/659/660/664/693/782, 32/38/56/138/150/170/246/311/336/340/357/388/394/397/401/404/514/609/659/660/664/782, 32/38/56/138/150/170/246/311/336/340/357/375/388/394/401/404/514/609/659/660/664/782, 32/38/56/137/138/150/170/246/311/336/340/357/382/388/394/401/404/514/609/659/660/664, 32/38/56/138/150/170/246/311/336/340/357/388/394/401/404/514/609/655/659/660/664/782, 32/38/56/137/138/150/170/246/311/336/340/357/382/388/392/394/401/404/514/609/659/660/664/782, 32/38/56/138/150/170/246/311/336/340/357/388/391/394/401/404/514/609/659/660/664/782, 32/38/56/137/138/150/170/246/311/336/340/357/388/394/401/404/514/609/655/659/660/664/721/763/782, 32/38/56/138/150/170/246/311/336/340/357/388/394/401/404/514/609/659/660/664/696/782, 32/38/56/138/150/170/246/311/336/340/357/388/394/401/404/514/609/659/660/663/664/782, 32/38/56/137/138/150/170/246/311/336/340/357/382/388/394/401/404/514/609/659/660/664/782, 32/38/56/137/138/150/170/246/311/336/340/357/382/388/392/394/401/404/514/609/650/655/659/660/664, 32/38/56/137/138/150/170/246/311/336/340/357/382/388/394/401/404/514/609/629/659/660/664/672/782, 32/38/56/138/150/170/246/311/336/340/357/388/394/401/404/514/609/616/659/660/664/782, 32/38/56/138/150/170/246/311/336/340/357/388/394/401/404/514/609/659/660/664/690/782, 32/38/56/138/150/170/179/246/311/336/340/357/388/394/401/404/514/609/659/660/664/782, 32/38/56/137/138/150/170/246/311/336/340/357/388/394/401/404/514/609/659/660/664/782, 32/38/56/138/150/170/246/311/336/340/357/382/388/394/401/404/514/609/659/660/664/670/782, 32/38/56/138/150/170/246/311/336/340/357/388/394/401/404/514/609/659/660/664/670/672/782, 32/38/56/138/150/170/246/311/336/340/357/388/394/401/404/514/609/629/659/660/664/782, or 32/38/56/138/150/170/246/311/336/340/357/388/394/401/404/514/609/655/659/660/664/670/782, wherein the amino acid positions are relative to the reference sequence corresponding to residues 8 to 890 of SEQ ID NO: 2, or relative to the reference sequence corresponding to SEQ ID NO: 2.

[0168] In some embodiments, the amino acid sequence of the engineered RNA polymerase comprises at least a substitution set or amino acid residues 32V/38G/56T/138R/150Y/170L/246K/311G/336S/340W/357E/367P/388K/394K/401R/404L/514S/609E/659R/660W/664P/782V, 32V/38G/56T/138R/150Y/170L/246K/311G/336S/340W/357E/382R/388K/394K/401R/404L/514S/609E/659R/660W/664P/782V, 32V/38G/56T/138R/150Y/170L/246K/311G/336S/340W/357E/388K/394K/401R/404L/514S/609E/659R/660W/664P/670R/782V, 32V/38G/56T/138R/150Y/170L/246K/311G/336S/340W/357E/382L/388K/394K/401R/404L/514S/609E/659R/660W/664P/782V, 32V/38G/56T/138R/150Y/170L/246K/311G/336S/340W/357E/388K/394K/401R/404L/514S/609E/659R/660W/664P/672P/782V, 32V/38G/56T/138R/150Y/170L/246K/311G/336S/340W/357P/388K/394K/401R/404L/514S/609E/659R/660W/664P/782V, 32V/38G/56T/138R/150Y/170L/246K/311G/336S/340W/357E/388R/394K/401R/404L/514S/609E/659R/660W/664P/782V, 32V/38G/56T/138R/150Y/170L/246K/311G/336S/340W/357E/388K/394K/401R/404L/514S/609E/659R/660W/664P/693R/782V, 32V/38G/56T/138R/150Y/170L/246K/311 G/336S/340W/357E/388K/394K/401R/404L/514S/609E/659R/660W/664P/672S/782V, 32V/38G/56T/138R/150Y/170L/246K/311 G/336S/340W/357E/388K/394K/397S/401R/404L/514S/609E/659R/660W/664P/782V, 32V/38G/56T/138R/150Y/170L/246K/311 G/336S/340W/357E/375P/388K/394K/401R/404L/514S/609E/659R/660W/664P/782V, 32V/38G/56T/138R/150Y/170L/246K/311 G/336S/340W/357E/388K/394K/401R/404L/514S/609E/659R/660W/664P/672G/782V, 32V/38G/56T/137G/138R/150Y/170L/246K/311G/336S/340W/357E/382R/388K/394K/401R/404L/514S/609E/659R/660W/664P, 32V/38G/56T/138R/150Y/170L/246K/311 G/336S/340W/357E/388K/394K/401R/404L/514S/609E/655R/659R/660 W/664P/782V, 32V/38G/56T/137G/138R/150Y/170L/246K/311G/336S/340W/357E/382R/388K/392A/394K/401R/404L/514S/609E/659R/660W/664P/782V, 32V/38G/56T/138R/150Y/170L/246K/311G/336S/340W/357E/388K/391F/394K/401R/404L/514S/609E/659R/660W/664P/782V, 32V/38G/56T/137G/138R/150Y/170L/246K/311G/336S/340W/357E/388K/394K/401R/404L/514S/609E/655M/659R/660W/664P/721T/763S/782V, 32V/38G/56T/138R/150Y/170L/246K/311G/336S/340W/357E/388K/394K/401R/404L/514S/609E/659R/660W/664P/696L/782V, 32V/38G/56T/138R/150Y/170L/246K/311G/336S/340W/357E/388K/394K/401R/404L/514S/609E/659R/660W/664P/672R/782V, 32V/38G/56T/138R/150Y/170L/246K/311G/336S/340W/357E/388K/394K/401R/404L/514S/609E/659R/660W/663L/664P/782V, 32V/38G/56T/138R/150Y/170L/246K/311G/336S/340W/357E/367T/388K/394K/401R/404L/514S/609E/659R/660W/664P/782V, 32V/38G/56T/138R/150Y/170L/246K/311G/336S/340W/357E/367F/388K/394K/401R/404L/514S/609E/659R/660W/664P/782V, 32V/38G/56T/137G/138R/150Y/170L/246K/311G/336S/340W/357E/382G/388K/394K/401R/404L/514S/609E/659R/660W/664P/782V, 32V/38G/56T/137G/138R/150Y/170L/246K/311G/336S/340W/357E/382G/388K/392R/394K/401R/404L/514S/609E/650M/655M/659R/660W/664P, 32V/38G/56T/137G/138R/150Y/170L/246K/311G/336S/340W/357E/382R/388K/394K/401R/404L/514S/609E/629R/659R/660Y/664P/672T/782V, 32V/38G/56T/138R/150Y/170L/246K/311G/336S/340W/357E/388K/391S/394K/401R/404L/514S/609E/659R/660W/664P/782V, 32V/38G/56T/138R/150Y/170L/246K/311G/336S/340W/357E/388K/394K/401R/404L/514S/609E/616A/659R/660W/664P/782V, 32V/38G/56T/138R/150Y/170L/246K/311G/336S/340W/357E/388K/394K/401R/404L/514S/609E/659R/660W/664P/690S/782V, 32V/38G/56T/138R/150Y/170L/179N/246K/311G/336S/340W/357E/388K/394K/401R/404L/514S/609E/659R/660W/664P/782V, 32V/38G/56T/137G/138R/150Y/170L/246K/311G/336S/340W/357E/388K/394K/401R/404L/514S/609E/659R/660W/664P/782V, 32V/38G/56T/138R/150Y/170L/246K/311G/336S/340W/357P/382R/388K/394K/401R/404L/514S/609E/659R/660W/664P/670R/782V, 32V/38G/56T/138R/150Y/170L/246K/311G/336S/340W/357E/388R/394K/401R/404L/514S/609E/659R/660W/664 P/670R/672P/782V, 32V/38G/56T/138R/150Y/170L/246K/311G/336S/340W/357P/375P/388K/394K/401R/404L/514S/609E/659R/660W/664P/782V, 32V/38G/56T/138R/150Y/170L/246K/311G/336S/340W/357P/388K/394K/401R/404L/514S/609E/659R/660W/664P/672G/782V, 32V/38G/56T/138R/150Y/170L/246K/311G/336S/340W/357E/388K/394K/401R/404L/514S/609E/629K/659R/660W/664P/782V, or 32V/38G/56T/138R/150Y/170L/246K/311G/336S/340W/357E/388K/394K/401R/404L/514S/609E/655R/659R/660W/664P/670R/782V, wherein the amino acid positions are relative to the reference sequence corresponding to residues 8 to 890 of SEQ ID NO: 2, or relative to the reference sequence corresponding to SEQ ID NO: 2.

[0169] In some embodiments, the amino acid sequence of the engineered RNA polymerase comprises at least a substitution set at amino acid positions 32/38/56/137/138/150/170/246/311/336/340/357/388/394/401/404/514/609/629/659/660/664/782, 32/38/56/138/150/170/246/336/340/357/382/388/394/401/404/514/609/629/659/660/664/782, 32/38/56/137/138/143/150/170/246/311/336/340/357/388/394/401/404/514/609/629/659/660/664/721/782, 32/38/56/137/138/150/170/246/311/336/340/357/388/392/394/401/404/514/609/629/659/660/664/782, 32/38/137/138/143/150/170/246/311/336/340/357/388/394/401/514/609/629/659/660/664/720/782, 32/38/56/138/143/150/170/246/311/336/340/357/388/394/401/404/514/609/629/659/660/664/782, 32/38/56/138/150/170/246/311/336/340/357/388/392/394/401/404/514/609/629/659/660/664/782, 32/38/56/138/150/170/246/311/336/340/357/388/392/394/401/514/609/629/659/660/664/782, or 32/38/56/138/150/170/196/246/311/336/340/357/388/392/394/401/404/514/609/629/659/660/664/782, wherein the amino acid positions are relative to the reference sequence corresponding to residues 8 to 890 of SEQ ID NO: 2, or relative to the reference sequence corresponding to SEQ ID NO: 2.

[0170] In some embodiments, the amino acid sequence of the engineered RNA polymerase comprises at least a substitution set or amino acid residues 32V/38G/56T/137G/138R/150Y/170L/246K/311G/336S/340W/357E/388K/394K/401R/404L/514S/609E/629K/659R/660W/664P/782V, 32V/38G/56E/138R/150Y/170L/246K/336S/340W/357E/382R/388K/394K/401R/404L/514S/609E/629K/659R/660W/664P/782V, 32V/38G/56E/137G/138R/143N/150Y/170L/246K/311G/336S/340W/357E/388K/394K/401R/404L/514S/609E/629K/659R/660W/664P/721A/782V, 32V/38G/56T/137G/138R/150Y/170L/246K/311G/336S/340W/357E/388K/392A/394K/401R/404L/514S/609E/629K/659R/660W/664P/782V, 32V/38G/56E/137G/138R/150Y/170L/246K/311G/336S/340W/357E/388K/392A/394K/401R/404L/514S/609E/629K/659R/660W/664P/782V, 32V/38G/137G/138R/143N/150Y/170L/246K/311G/336S/340W/357E/388K/394K/401R/514S/609E/629K/659R/660W/664P/720s/782V, 32V/38G/56E/138R/143N/150Y/170L/246R/311G/336S/340W/357E/388K/394K/401R/404L/514S/609E/629K/659R/660W/664P/782V, 32V/38G/56E/138R/150Y/170L/246K/311G/336S/340W/357E/388K/392R/394K/401R/404L/514S/609E/629K/659R/660W/664P/782V, 32V/38G/56T/138R/150Y/170L/246K/311G/336S/340W/357E/388K/392R/394K/401R/514S/609E/629K/659R/660W/664P/782V, 32V/38G/56T/138R/150Y/170L/246K/311G/336S/340W/357E/388K/392R/394K/401R/404L/514S/609E/629K/659R/660W/664P/782V, 32V/38G/56T/137G/138R/150Y/170L/246K/311G/336S/340W/357E/388K/392R/394K/401R/404L/514S/609E/629K/659R/660W/664P/782V, 32V/38G/56E/137G/138R/150Y/170L/246K/311G/336S/340W/357E/388K/394K/401R/404L/514S/609E/629K/659R/660W/664P/782V, or 32V/38G/56E/138R/150Y/170L/196S/246K/311G/336S/340W/357E/388K/392A/394K/401R/404L/514S/609E/629K/659R/660W/664P/782V, wherein the amino acid positions are relative to the reference sequence corresponding to residues 8 to 890 of SEQ ID NO: 2, or relative to the reference sequence corresponding to SEQ ID NO: 2.

[0171] In some embodiments, the amino acid sequence of the engineered RNA polymerase comprises at least a substitution at an amino acid position set forth in Tables 5.1, 6.1, 7.1, 8.1, 9.1, 10.1, 11.1, 12.1, 14.1, 15.1, 16.1, 17.1, 18.1, 19.1, 23.1, and 24.1, wherein the amino acid positions are relative to the reference sequence corresponding to residues 8 to 890 of SEQ ID NO: 2, or relative to the reference sequence corresponding to SEQ ID NO: 2.

[0172] In some embodiments, the amino acid sequence of the engineered RNA polymerase comprises at least one substitution as set forth in Tables 5.1, 6.1, 7.1, 8.1, 9.1, 10.1, 11.1, 12.1, 14.1, 15.1, 16.1, 17.1, 18.1, 19.1, 23.1, and 24.1, wherein the amino acid positions are relative to the reference sequence corresponding to residues 8 to 890 of SEQ ID NO: 2, or relative to the reference sequence corresponding to SEQ ID NO: 2.

[0173] In some embodiments, the amino acid sequence of the engineered RNA polymerase comprises at least a substitution or substitution set at the amino acid position(s) set forth in Tables 5.1, 6.1, 7.1, 8.1, 9.1, 10.1, 11.1, 12.1, 14.1, 15.1, 16.1, 17.1, 18.1, 19.1, 23.1, and 24.1, wherein the amino acid positions are relative to the reference sequence corresponding to residues 8 to 890 of SEQ ID NO: 2, or relative to the reference sequence corresponding to SEQ ID NO: 2.

[0174] In some embodiments, the amino acid sequence of the engineered RNA polymerase comprises at least a substitution or substitution set of an engineered RNA polymerase variant set forth in Tables 5.1, 6.1, 7.1, 8.1, 9.1, 10.1, 11.1, 12.1, 14.1, 15.1, 16.1, 17.1, 18.1, 19.1, 23.1, and 24.1, wherein the amino acid positions are relative to the reference sequence corresponding to residues 8 to 890 of SEQ ID NO: 2, or relative to the reference sequence corresponding to SEQ ID NO: 2.

[0175] In some embodiments, the engineered RNA polymerase comprises an amino acid sequence having at least 70%, 75%, 80%, 81%, 82%, 83%, 84%, 85%, 86%, 87%, 88%, 89%, 90%, 91%, 92%, 93%, 94%, 95%, 96%, 97%, 98%, 99%, or more sequence identity to a reference sequence comprising at least a substitution or substitution set as set forth in Tables 5.1, 6.1, 7.1, 8.1, 9.1, 10.1, 11.1, 12.1, 14.1, 15.1, 16.1, 17.1, 18.1, 19.1, 23.1, and 24.1, wherein the amino acid positions are relative to the reference sequence corresponding to residues 8 to 890 of SEQ ID NO: 2, or relative to the reference sequence corresponding to SEQ ID NO: 2.

[0176] In some embodiments, the engineered RNA polymerase comprises an amino acid sequence having at least 70%, 75%, 80%, 81%, 82%, 83%, 84%, 85%, 86%, 87%, 88%, 89%, 90%, 91%, 92%, 93%, 94%, 95%, 96%, 97%, 98%, 99%, or more sequence identity to the reference sequence corresponding to residues 8 to 890 of SEQ ID NO: 4, 32, 44, 156, 234, 238, 386, 394, 588, 604, 686, 692, 712, or 800, or to the reference sequence corresponding to SEQ ID NO: 4, 32, 44, 156, 234, 238, 386, 394, 588, 604, 686, 692, 712, or 800.

[0177] In some embodiments, the engineered RNA polymerase comprises an amino acid sequence having at least 70%, 75%, 80%, 81%, 82%, 83%, 84%, 85%, 86%, 87%, 88%, 89%, 90%, 91%, 92%, 93%, 94%, 95%, 96%, 97%, 98%, 99% or more sequence identity to the sequence corresponding to residues 8 to 890 of an even numbered SEQ ID NO. of SEQ ID NOs: 4-828, or to the sequence corresponding to an even numbered SEQ ID NO. of SEQ ID NOs: 4-828.

[0178] In some embodiments, the engineered RNA polymerase comprises an amino acid sequence having at least 70%, 75%, 80%, 81%, 82%, 83%, 84%, 85%, 86%, 87%, 88%, 89%, 90%, 91%, 92%, 93%, 94%, 95%, 96%, 97%, 98%, 99%, or more sequence identity to the reference sequence corresponding to residues 8 to 890 of SEQ ID NO: 4, 32, 44, 156, 234, 238, 386, 394, 588, 604, 686, 692, 712, or 800, or to the reference sequence corresponding to SEQ ID NO: 4, 32, 44, 156, 234, 238, 386, 394, 588, 604, 686, 692, 712, or 800, wherein the amino acid sequence comprises one or more substitutions relative to the reference sequence corresponding to residues 8 to 890 of SEQ ID NO: 4, 32, 44, 156, 234, 238, 386, 394, 588, 604, 686, 692, 712, or 800, or relative to the reference sequence corresponding to SEQ ID NO: 4, 32, 44, 156, 234, 238, 386, 394, 588, 604, 686, 692, 712, or 800.

[0179] In some embodiments, the engineered RNA polymerase comprises an amino acid sequence having at least 70%, 75%, 80%, 81%, 82%, 83%, 84%, 85%, 86%, 87%, 88%, 89%, 90%, 91%, 92%, 93%, 94%, 95%, 96%, 97%, 98%, 99%, or more sequence identity to the reference sequence corresponding to residues 8 to 890 of an even-numbered SEQ ID NO. of SEQ ID NOs: 4-828, or to the reference sequence corresponding to an even-numbered SEQ ID NO. of SEQ ID NOs: 4-828, wherein the amino acid sequence comprises one or more substitutions relative to the reference sequence corresponding to residues 8 to 890 of SEQ ID NO: 4, 32, 44, 156, 234, 238, 386, 394, 588, 604, 686, 692, 712, or 800, or relative to the reference sequence corresponding to SEQ ID NO: 4, 32, 44, 156, 234, 238, 386, 394, 588, 604, 686, 692, 712, or 800.

[0180] In some embodiments, the amino acid sequence of the engineered RNA polymerase comprises at least a substitution at amino acid position 13, 14, 15, 17, 19, 21, 32, 33, 38, 45, 52, 54, 55, 56, 56, 57, 60, 61, 62, 63, 67, 69, 72, 75, 78, 81, 82, 83, 84, 89, 93, 95, 100, 105, 111, 115, 122, 124, 127, 131, 133, 135, 137, 138, 139, 140, 141, 143, 150, 160, 161, 162, 164, 166, 168, 169, 170, 171, 172, 173, 179, 185, 187, 193, 196, 207, 212, 217, 218, 221, 227, 237, 239, 240, 245, 246, 250, 253, 254, 257, 261, 272, 274, 275, 311, 336, 340, 342, 351, 357, 367, 375, 379, 382, 388, 391, 392, 394, 397, 401, 402, 403, 404, 419, 424, 437, 440, 494, 510, 514, 517, 527, 529, 530, 531, 533, 536, 589, 594, 598, 607, 609, 615, 616, 617, 625, 629, 648, 650, 655, 659, 660, 663, 664, 666, 670, 672, 690, 693, 696, 718, 720, 721, 749, 759, 763, 773, 775, 779, 782, 782, 810, 854, 857, 867, 875, or 878 or combinations thereof, wherein the amino acid positions are relative to the reference sequence corresponding to residues 8 to 890 of SEQ ID NO: 4, 32, 44, 156, 234, 238, 386, 394, 588, 604, 686, 692, 712, or 800, or relative to the reference sequence corresponding to SEQ ID NO: 4, 32, 44, 156, 234, 238, 386, 394, 588, 604, 686, 692, 712, or 800.

[0181] In some embodiments, the amino acid sequence of the engineered RNA polymerase comprises at least a substitution or an amino acid residue 13N, 14Q/Y, 15T, 17N, 19E, 21G, 32S/T/V, 33E, 38G/R, 45K, 52T, 54H, 55D/S/W, 56A/E/G/N/T/V, 57G, 60G/L/M/R, 61W/Y, 62T, 63S, 67R, 69S, 72R, 75S/Y, 78S, 81C/L, 82S, 83K, 84A, 89Q, 93Y, 95Y, 100R, 105R, 111K, 115L/V, 122I, 124F, 127G, 131T, 133C, 135G/K, 137G, 138N/R, 139R, 140R, 141A, 143N/Q/R/V, 150Q/Y, 160F/L, 161R, 162V, 164W, 166D/R/T/V, 168K/L/R/S/T/V/W, 169G/L, 170L/Q/R/S, 171E/F/L/Y, 172A/E/G/K/R/V, 173D/H/L/Y/V, 179N, 185I/L/P, 187G/H/L, 193G, 196A/C/G/S/V, 207S, 212R/Y, 217P/V, 218Q/T, 221C, 227V, 237L, 239L/R, 240M, 245C, 246K/RN, 250R, 253Y, 254G/S, 257L/V, 261M, 272N, 274G/L, 275A/Y, 311A/G, 336K/L/M/S/V, 340E/K/W, 342Q, 351L, 357E/P, 367F/P/T, 375F/P, 379A/S, 382G/L/R, 388A/K/R, 391F/S, 392A/M/R, 394K, 397S, 401R, 402T, 403V, 404I/L/S/Y, 419R/S, 424A, 437P/S, 440K, 494G, 510V, 514I/L/S, 517R, 527E, 529R, 530N, 531Q, 533S, 536E/V, 589C, 594G, 598A/K/L/R/V, 607Y, 609C/E/F/P/W, 615A, 616A, 617R, 625C, 629A/D/K/R, 648F, 650M, 655M/R, 659E/R, 660H/W/Y, 663L, 664K/P, 666M, 670Q/R, 672G/P/R/S/T, 690S, 693R, 696L, 718F/N/S/V/Y, 720A/G/I/P/S, 721A/E/M/S/T/Y, 749R, 759M, 763S, 773A, 775K/R, 779R, 782E/R, 782V, 810K, 854T, 857V, 867Q, 875C, or 878M, or combinations thereof, wherein the amino acid positions are relative to the reference sequence corresponding to residues 8 to 890 of SEQ ID NO: 4, 32, 44, 156, 234, 238, 386, 394, 588, 604, 686, 692, 712, or 800, or relative to the reference sequence corresponding to SEQ ID NO: 4, 32, 44, 156, 234, 238, 386, 394, 588, 604, 686, 692, 712, or 800.

[0182] In some embodiments, the amino acid sequence of the engineered RNA polymerase comprises at least a substitution at amino acid position 32, 38, 56, 138, 150, 170, 171, 173, 246, 311, 336, 340, 357, 388, 394, 401, 404, 437, 514, 536, 609, 629, 659, 660, 664, 779, or 782, or combinations thereof, wherein the amino acid positions are relative to the reference sequence corresponding to residues 8 to 890 of SEQ ID NO: 4, 32, 44, 156, 234, 238, 386, 394, 588, 604, 686, 692, 712, or 800, or relative to the reference sequence corresponding to SEQ ID NO: 4, 32, 44, 156, 234, 238, 386, 394, 588, 604, 686, 692, 712, or 800.

[0183] In some embodiments, the amino acid sequence of the engineered RNA polymerase comprises at least a substitution or an amino acid residue 32V, 38G, 56T, 138R/N, 150Y, 170Q, 171E, 173Y, 246K, 311A/G, 336K/S, 340K/W, 357E, 388A/K, 394K, 401R, 404L/S, 437P, 514S, 536V, 609E, 629A, 659R, 660H/W, 664P, 779R, or 782V, or combinations thereof, wherein the amino acid positions are relative to the reference sequence corresponding to residues 8 to 890 of SEQ ID NO: 4, 32, 44, 156, 234, 238, 386, 394, 588, 604, 686, 692, 712, or 800, or relative to the reference sequence corresponding to SEQ ID NO: 4, 32, 44, 156, 234, 238, 386, 394, 588, 604, 686, 692, 712, or 800.

[0184] In some embodiments, the engineered RNA polymerase comprises an amino acid sequence having at least 70%, 75%, 80%, 81%, 82%, 83%, 84%, 85%, 86%, 87%, 88%, 89%, 90%, 91%, 92%, 93%, 94%, 95%, 96%, 97%, 98%, 99%, or more sequence identity to the reference sequence corresponding to residues 8 to 890 of SEQ ID NO: 4, or to the reference sequence corresponding to SEQ ID NO: 4, wherein the amino acid sequence comprises one or more substitutions relative to the reference sequence corresponding to residues 8 to 890 of SEQ ID NO: 4, or relative to the reference sequence corresponding to SEQ ID NO: 4.

[0185] In some embodiments, the engineered RNA polymerase comprises an amino acid sequence having at least 70%, 75%, 80%, 81%, 82%, 83%, 84%, 85%, 86%, 87%, 88%, 89%, 90%, 91%, 92%, 93%, 94%, 95%, 96%, 97%, 98%, 99%, or more sequence identity to a reference sequence corresponding to residues 8 to 890 of an even-numbered SEQ ID NO. of SEQ ID NOs: 28-40, or to a reference sequence corresponding to an even-numbered SEQ ID NO. of SEQ ID NOs: 28-40, wherein the amino acid sequence comprises one or more substitutions relative to the reference sequence corresponding to residues 8 to 890 of SEQ ID NO: 4, or relative to the reference sequence corresponding to SEQ ID NO: 4.

[0186] In some embodiments, the amino acid sequence of the engineered RNA polymerase comprises at least a substitution at amino acid position(s) 311/388/404/440, 138/340, 138/311/336/340/388, 311/388/440, 138/311/340/388/404/440, 138/336/342, or 351/388, wherein the amino acid positions are relative to the reference sequence corresponding to residues 8 to 890 of SEQ ID NO: 4, or relative to the reference sequence corresponding to SEQ ID NO: 4.

[0187] In some embodiments, the amino acid sequence of the engineered RNA polymerases comprises at least a substitution set or amino acid residues 311G/388K/404Y/440K, 138R/340W, 138R/311G/336S/340W/388K, 311G/388K/440K, 138R/311G/340E/388K/404Y/440K, 138R/336M/342Q, or 351L/388K, wherein the amino acid positions are relative to the reference sequence corresponding to residues 8 to 890 of SEQ ID NO: 4, or relative to the reference sequence corresponding to SEQ ID NO: 4.

[0188] In some embodiments, the amino acid sequence of the engineered RNA polymerases comprises at least a substitution set A311G/A388K/L404Y/N440K, N138R/K340W, N138R/A311G/K336S/K340W/A388K, A311G/A388K/N440K, N138R/A311G/K340E/A388K/L404Y/N440K, N138R/K336M/L342Q, or W351L/A388K, wherein the amino acid positions are relative to the reference sequence corresponding to residues 8 to 890 of SEQ ID NO: 4, or relative to the reference sequence corresponding to SEQ ID NO: 4.

[0189] In some embodiments, the engineered RNA polymerase comprises an amino acid sequence having at least 70%, 75%, 80%, 81%, 82%, 83%, 84%, 85%, 86%, 87%, 88%, 89%, 90%, 91%, 92%, 93%, 94%, 95%, 96%, 97%, 98%, 99%, or more sequence identity to the reference sequence corresponding to residues 8 to 890 of SEQ ID NO: 32, or to the reference sequence corresponding to SEQ ID NO: 32, wherein the amino acid sequence comprises one or more substitutions relative to the reference sequence corresponding to residues 8 to 890 of SEQ ID NO: 32, or relative to the reference sequence corresponding to SEQ ID NO: 32.

[0190] In some embodiments, the engineered RNA polymerase comprises an amino acid sequence having at least 70%, 75%, 80%, 81%, 82%, 83%, 84%, 85%, 86%, 87%, 88%, 89%, 90%, 91%, 92%, 93%, 94%, 95%, 96%, 97%, 98%, 99%, or more sequence identity to a reference sequence corresponding to residues 8 to 890 of an even-numbered SEQ ID NO. of SEQ ID NOs: 42-188, or to a reference sequence corresponding to an even-numbered SEQ ID NO. of SEQ ID NOs: 42-188, wherein the amino acid sequence comprises one or more substitutions relative to the reference sequence corresponding to residues 8 to 890 of SEQ ID NO: 32, or relative to the reference sequence corresponding to SEQ ID NO: 32.

[0191] In some embodiments, the amino acid sequence of the engineered RNA polymerase comprises at least a substitution or substitution set at amino acid position(s) 514, 38/514, 38/394/514, 38/394/514/664, 394/514/875, 394/514, 38/124/394/514, 171/878, 170, 173, 172, 170/629, 171, 168, 166, 166/272/274/275, 169, 207, 168/217/218, 171/530, 382, 773, 670, 379, 392, 419, 57, 164, 810, 659, 54, 172/173/514/659/660, 170/171/172/514/659, 173/514/659/660, 173/514/659/810, 170/340/514/659/660/810, 170/171/173/336/340/514/659/660, 57/171/173/514/659/660/810, 170/173/514/659/660/810, 57/171/172/336/340/514/659, 173/514, 171/172/173/514/659/660, 57/170/171/173/514/659/660/810, 57/173/514, 172/173/514/857, 57/173/340/514, 170/171/173/336/514, 171/514, 57/170/173/336/514, 170/336, 173/514/659, 57/514, or 173/810, wherein the amino acid positions are relative to the reference sequence corresponding to residues 8 to 890 of SEQ ID NO: 32, or relative to the reference sequence corresponding to SEQ ID NO: 32.

[0192] In some embodiments, the amino acid sequence of the engineered RNA polymerases comprises at least a substitution or substitution set, or amino acid residue(s) 514S, 38G/514S, 38G/394K/514S, 38G/394K/514S/664P, 394K/514S/875C, 394K/514S, 38G/124F/394K/514I, 171E/878M, 170Q, 173Y, 172V, 173L, 172E, 170S/629D, 171F, 168V, 172K, 166R, 168K, 166V/272N/274L/275Y, 170R, 169L, 207S, 169G, 168L/217P/218Q, 168W, 172R, 166D, 171L, 171Y/530N, 172A, 173H, 382R, 773A, 168R, 670R, 168T, 172G, 379A, 392M, 419R, 392R, 392A, 57G, 168S, 164W, 670Q, 810K, 382G, 659R, 54H, 419S, 172E/173Y/514S/659R/660H, 170Q/171E/172E/514S/659R, 173Y/514S/659R/660H, 173Y/514S/659R/810K, 170Q/340K/514S/659R/660H/810K, 170Q/171E/173Y/336K/340K/514S/659R/660H, 57G/171E/173Y/514S/659R/660H/810K, 170Q/173Y/514S/659R/660H/810K, 57G/171E/172K/336K/340K/514S/659R, 173Y/514S, 171E/172E/173Y/514S/659R/660H, 57G/170Q/171E/173Y/514S/659R/660H/810K, 57G/173Y/514S, 172K/173D/514S/857V, 57G/173Y/340K/514S, 170Q/171E/173Y/336K/514S, 171E/514S, 57G/170Q/173Y/336K/514S, 170Q/336K, 173Y/514S/659R, 57G/514S, or 173Y/810K, wherein the amino acid positions are relative to the reference sequence corresponding to residues 8 to 890 of SEQ ID NO: 32, or relative to the reference sequence corresponding to SEQ ID NO: 32.

[0193] In some embodiments, the amino acid sequence of the engineered RNA polymerases comprises at least a substitution or substitution set L514S, R38G/L514S, R38G/R394K/L514S, R38G/R394K/L514S/W664P, R394K/L514S/G875C, R394K/L514S, R38G/I124F/R394K/L514I, K171E/N878M, K170Q, V173Y, N172V, V173L, N172E, K170S/A629D, K171F, H168V, N172K, A166R, H168K, A166V/S272N/M274L/F275Y, K170R, F169L, A207S, F169G, H168L/I217P/H218Q, H168W, N172R, A166D, K171L, K171Y/H530N, N172A, V173H, T382R, D773A, H168R, K670R, H168T, N172G, E379A, Y392M, K419R, Y392R, Y392A, R57G, H168S, L164W, K670Q, G810K, T382G, E659R, G54H, K419S, N172E/V173Y/L514S/E659R/D660H, K170Q/K171E/N172E/L514S/E659R, V173Y/L514S/E659R/D660H, V173Y/L514S/E659R/G810K, K170Q/W340K/L514S/E659R/D660H/G810K, K170Q/K171E/V173Y/S336K/W340K/L514S/E659R/D660H, R57G/K171E/V173Y/L514S/E659R/D660H/G810K, K170Q/V173Y/L514S/E659R/D660H/G810K, R57G/K171E/N172K/S336K/W340K/L514S/E659R, V173Y/L514S, K171E/N172E/V173Y/L514S/E659R/D660H, R57G/K170Q/K171E/V173Y/L514S/E659R/D660H/G810K, R57G/V173Y/L514S, N172K/V173D/L514S/A857V, R57G/V173Y/W340K/L514S, K170Q/K171E/V173Y/S336K/L514S, K171E/L514S, R57G/K170Q/V173Y/S336K/L514S, K170Q/S336K, V173Y/L514S/E659R, R57G/L514S, or V173Y/G810K, wherein the amino acid positions are relative to the reference sequence corresponding to residues 8 to 890 of SEQ ID NO: 32, or relative to the reference sequence corresponding to SEQ ID NO: 32.

[0194] In some embodiments, the engineered RNA polymerase comprises an amino acid sequence having at least 70%, 75%, 80%, 81%, 82%, 83%, 84%, 85%, 86%, 87%, 88%, 89%, 90%, 91%, 92%, 93%, 94%, 95%, 96%, 97%, 98%, 99%, or more sequence identity to the reference sequence corresponding to residues 8 to 890 of SEQ ID NO: 44, or to the reference sequence corresponding to SEQ ID NO: 44, wherein the amino acid sequence comprises one or more substitutions relative to the reference sequence corresponding to residues 8 to 890 of SEQ ID NO: 44, or relative to the reference sequence corresponding to SEQ ID NO: 44.

[0195] In some embodiments, the engineered RNA polymerase comprises an amino acid sequence having at least 70%, 75%, 80%, 81%, 82%, 83%, 84%, 85%, 86%, 87%, 88%, 89%, 90%, 91%, 92%, 93%, 94%, 95%, 96%, 97%, 98%, 99%, or more sequence identity to a reference sequence corresponding to residues 8 to 890 of an even-numbered SEQ ID NO. of SEQ ID NOs: 190-194, or to a reference sequence corresponding to an even-numbered SEQ ID NO. of SEQ ID NOs: 190-194, wherein the amino acid sequence comprises one or more substitutions relative to the reference sequence corresponding to residues 8 to 890 of SEQ ID NO: 44, or relative to the reference sequence corresponding to SEQ ID NO: 44.

[0196] In some embodiments, the amino acid sequence of the engineered RNA polymerase comprises at least a substitution or substitution set at amino acid position(s) 336, 143/336/340/782 or 143/336/340/357/514, wherein the amino acid positions are relative to the reference sequence corresponding to residues 8 to 890 of SEQ ID NO: 44, or relative to the reference sequence corresponding to SEQ ID NO: 44.

[0197] In some embodiments, the amino acid sequence of the engineered RNA polymerases comprises at least a substitution or substitution set, or amino acid residue(s) 336K, 143V/336K/340K/782V or 143V/336K/340K/357E/514L, wherein the amino acid positions are relative to the reference sequence corresponding to residues 8 to 890 of SEQ ID NO: 44, or relative to the reference sequence corresponding to SEQ ID NO: 44.

[0198] In some embodiments, the amino acid sequence of the engineered RNA polymerases comprises at least a substitution or substitution set S336K, A143V/S336K/W340K/E782V, or A143V/S336K/W340K/R357E/S514L, wherein the amino acid positions are relative to the reference sequence corresponding to residues 8 to 890 of SEQ ID NO: 44, or relative to the reference sequence corresponding to SEQ ID NO: 44.

[0199] In some embodiments, the engineered RNA polymerase comprises an amino acid sequence having at least 70%, 75%, 80%, 81%, 82%, 83%, 84%, 85%, 86%, 87%, 88%, 89%, 90%, 91%, 92%, 93%, 94%, 95%, 96%, 97%, 98%, 99%, or more sequence identity to the reference sequence corresponding to residues 8 to 890 of SEQ ID NO: 156, or to the reference sequence corresponding to SEQ ID NO: 156, wherein the amino acid sequence comprises one or more substitutions relative to the reference sequence corresponding to residues 8 to 890 of SEQ ID NO: 156, or relative to the reference sequence corresponding to SEQ ID NO: 156.

[0200] In some embodiments, the engineered RNA polymerase comprises an amino acid sequence having at least 70%, 75%, 80%, 81%, 82%, 83%, 84%, 85%, 86%, 87%, 88%, 89%, 90%, 91%, 92%, 93%, 94%, 95%, 96%, 97%, 98%, 99%, or more sequence identity to a reference sequence corresponding to residues 8 to 890 of an even-numbered SEQ ID NO. of SEQ ID NOs: 196-260, or to a reference sequence corresponding to an even-numbered SEQ ID NO. of SEQ ID NOs: 196-260, wherein the amino acid sequence comprises one or more substitutions relative to the reference sequence corresponding to residues 8 to 890 of SEQ ID NO: 156, or relative to the reference sequence corresponding to SEQ ID NO: 156.

[0201] In some embodiments, the amino acid sequence of the engineered RNA polymerase comprises at least a substitution or substitution set at amino acid position(s) 207, 419, 207/336/340, 166/169, 207/670, 166/336/340, 207/419/670, 207/336/340/382/419/670, 207/382, 670, 336/670, 340/670, 382, 127/141/207/336/382/670, 207/336/382/419/670, 419/670, 166/168/207/336/340/419/670, 166/340, or 207/336/340/670, wherein the amino acid positions are relative to the reference sequence corresponding to residues 8 to 890 of SEQ ID NO: 156, or relative to the reference sequence corresponding to SEQ ID NO: 156.

[0202] In some embodiments, the amino acid sequence of the engineered RNA polymerases comprises at least a substitution or substitution set, or amino acid residue(s) 207S, 419R, 207S/336K/340K, 166R/169L, 207S/670R, 166R/336K/340K, 207S/419R/670R, 207S/336K/340K/382G/419R/670R, 207S/382G, 670R, 336K/670R, 340K/670R, 382G, 127G/141A/207S/336K/382G/670R, 207S/336K/382G/419R/670R, 419R/670R, 166R/168V/207S/336K/340K/419R/670R, 166V/340K, or 207S/336K/340K/670R, wherein the amino acid positions are relative to the reference sequence corresponding to residues 8 to 890 of SEQ ID NO: 156, or relative to the reference sequence corresponding to SEQ ID NO: 156.

[0203] In some embodiments, the amino acid sequence of the engineered RNA polymerases comprises at least a substitution or substitution set A207S, K419R, A207S/S336K/W340K, A166R/F169L, A207S/K670R, A166R/S336K/W340K, A207S/K419R/K670R, A207S/S336K/W340K/T382G/K419R/K670R, A207S/T382G, K670R, S336K/K670R, W340K/K670R, T382G, K127G/V141A/A207S/S336K/T382G/K670R, A207S/S336K/T382G/K419R/K670R, K419R/K670R, A166R/H168V/A207S/S336K/W340K/K419R/K670R, A166V/W340K, or A207S/S336K/W340K/K670R, wherein the amino acid positions are relative to the reference sequence corresponding to residues 8 to 890 of SEQ ID NO: 156, or relative to the reference sequence corresponding to SEQ ID NO: 156.

[0204] In some embodiments, the amino acid sequence of the engineered RNA polymerase comprises at least a substitution or substitution set at amino acid position(s) 38/437/779, 38/437, 38, 38/207/437/779, 517/779, 38/437/527/664, 38/207/379/437, 664/670/779, 38/779, 38/437/517, 437/779, 38/437/607, 38/379/779, or 517/670/779, wherein the amino acid positions are relative to the reference sequence corresponding to residues 8 to 890 of SEQ ID NO: 156, or relative to the reference sequence corresponding to SEQ ID NO: 156.

[0205] In some embodiments, the amino acid sequence of the engineered RNA polymerases comprises at least a substitution or substitution set, or amino acid residue(s) 38G/437P/779R, 38G/437P, 38G, 38G/207S/437P/779R, 517R/779R, 38G/437P/527E/664K, 38G/207S/379S/437P, 664K/670R/779R, 38G/779R, 38G/437P/517R, 437P/779R, 38G/437P/607Y, 38G/379S/779R, or 517R/670R/779R, wherein the amino acid positions are relative to the reference sequence corresponding to residues 8 to 890 of SEQ ID NO: 156, or relative to the reference sequence corresponding to SEQ ID NO: 156.

[0206] In some embodiments, the amino acid sequence of the engineered RNA polymerases comprises at least a substitution or substitution set R38G/S437P/H779R, R38G/S437P, R38G, R38G/A207S/S437P/H779R, C517R/H779R, R38G/S437P/G527E/W664K, R38G/A207S/E379S/S437P, W664K/K670R/H779R, R38G/H779R, R38G/S437P/C517R, S437P/H779R, R38G/S437P/E607Y, R38G/E379S/H779R, or C517R/K670R/H779R, wherein the amino acid positions are relative to the reference sequence corresponding to residues 8 to 890 of SEQ ID NO: 156, or relative to the reference sequence corresponding to SEQ ID NO: 156.

[0207] In some embodiments, the amino acid sequence of the engineered RNA polymerase comprises at least a substitution set at amino acid positions 357/394/664 or 138/311/336/340/357/388/394/404/664, wherein the amino acid positions are relative to the reference sequence corresponding to residues 8 to 890 of SEQ ID NO: 156, or relative to the reference sequence corresponding to SEQ ID NO: 156.

[0208] In some embodiments, the amino acid sequence of the engineered RNA polymerases comprises at least a substitution set or amino acid residues 357E/394K/664P or 138N/311A/336K/340K/357E/388A/394K/404S/664P, wherein the amino acid positions are relative to the reference sequence corresponding to residues 8 to 890 of SEQ ID NO: 156, or relative to the reference sequence corresponding to SEQ ID NO: 156.

[0209] In some embodiments, the amino acid sequence of the engineered RNA polymerases comprises at least a substitution set R357E/R394K/W664P or R138N/G311A/S336K/W340K/R357E/K388A/R394K/L404S/W664P, wherein the amino acid positions are relative to the reference sequence corresponding to residues 8 to 890 of SEQ ID NO: 156, or relative to the reference sequence corresponding to SEQ ID NO: 156.

[0210] In some embodiments, the engineered RNA polymerase comprises an amino acid sequence having at least 70%, 75%, 80%, 81%, 82%, 83%, 84%, 85%, 86%, 87%, 88%, 89%, 90%, 91%, 92%, 93%, 94%, 95%, 96%, 97%, 98%, 99%, or more sequence identity to the reference sequence corresponding to residues 8 to 890 of SEQ ID NO: 234, or to the reference sequence corresponding to SEQ ID NO: 234, wherein the amino acid sequence comprises one or more substitutions relative to the reference sequence corresponding to residues 8 to 890 of SEQ ID NO: 234, or relative to the reference sequence corresponding to SEQ ID NO: 234.

[0211] In some embodiments, the engineered RNA polymerase comprises an amino acid sequence having at least 70%, 75%, 80%, 81%, 82%, 83%, 84%, 85%, 86%, 87%, 88%, 89%, 90%, 91%, 92%, 93%, 94%, 95%, 96%, 97%, 98%, 99%, or more sequence identity to a reference sequence corresponding to residues 8 to 890 of an even-numbered SEQ ID NO. of SEQ ID NOs: 262-384, or to a reference sequence corresponding to an even-numbered SEQ ID NO. of SEQ ID NOs: 262-384, wherein the amino acid sequence comprises one or more substitutions relative to the reference sequence corresponding to residues 8 to 890 of SEQ ID NO: 234, or relative to the reference sequence corresponding to SEQ ID NO: 234.

[0212] In some embodiments, the amino acid sequence of the engineered RNA polymerase comprises at least a substitution or substitution set at amino acid position(s) 720, 196, 609, 246, 185, 594, 212, 494, 375, 721, 72, 867, 160, 718, 187, 170/173, 615, 137/138, 854, 131, 38/185/187/437, 185/187, 437/609, 38/609, 38/185/187/437/609, 437/609/720, 185/187/609, 185/187/437, 437/721, 609/720, 185/187/246, or 185/187/437/609/720, wherein the amino acid positions are relative to the reference sequence corresponding to residues 8 to 890 of SEQ ID NO: 234, or relative to the reference sequence corresponding to SEQ ID NO: 234.

[0213] In some embodiments, the amino acid sequence of the engineered RNA polymerases comprises at least a substitution or substitution set, or amino acid residue(s) 720A, 196C, 609W, 196V, 246V, 185L, 594G, 212Y, 494G, 196A, 212R, 375F, 721T, 721A, 72R, 185I, 721S, 867Q, 721Y, 160F, 718F, 609F, 720S, 187L, 718V, 170L/173V, 609E, 718S, 609C, 609P, 721M, 615A, 187H, 196S, 721E, 718Y, 137G/138N, 187G, 720G, 720P, 854T, 720I, 160L, 131T, 38R/185L/187H/437S, 185L/187H, 185L/187L, 437S/609C, 38R/609P, 38R/185L/187H/437S/609C, 437S/609P/720A, 185L/187L/609P, 185L/187L/437S, 185L/187H/437S, 437S/609P, 437S/721S, 185L/187H/609E, 609P/720A, 185L/187L/246V, or 185L/187H/437S/609P/720A, wherein the amino acid positions are relative to the reference sequence corresponding to residues 8 to 890 of SEQ ID NO: 234, or relative to the reference sequence corresponding to SEQ ID NO: 234.

[0214] In some embodiments, the amino acid sequence of the engineered RNA polymerases comprises at least a substitution or substitution set K720A, D196C, T609W, D196V, Q246V, Y185L, I594G, H212Y, E494G, D196A, H212R, D375F, K721T, K721A, A72R, Y185I, K721S, K867Q, K721Y, R160F, K718F, T609F, K720S, K187L, K718V, K170L/Y173V, T609E, K718S, T609C, T609P, K721M, K615A, K187H, D196S, K721E, K718Y, D137G/R138N, K187G, K720G, K720P, D854T, K720I, R160L, A131T, G38R/Y185L/K187H/P437S, Y185L/K187H, Y185L/K187L, P437S/T609C, G38R/T609P, G38R/Y185L/K187H/P437S/T609C, P437S/T609P/K720A, Y185L/K187L/T609P, Y185L/K187L/P437S, Y185L/K187H/P437S, P437S/T609P, P437S/K721S, Y185L/K187H/T609E, T609P/K720A, Y185L/K187L/Q246V, or Y185L/K187H/P437S/T609P/K720A, wherein the amino acid positions are relative to the reference sequence corresponding to residues 8 to 890 of SEQ ID NO: 234, or relative to the reference sequence corresponding to SEQ ID NO: 234.

[0215] In some embodiments, the engineered RNA polymerase comprises an amino acid sequence having at least 70%, 75%, 80%, 81%, 82%, 83%, 84%, 85%, 86%, 87%, 88%, 89%, 90%, 91%, 92%, 93%, 94%, 95%, 96%, 97%, 98%, 99%, or more sequence identity to the reference sequence corresponding to residues 8 to 890 of SEQ ID NO: 386, or to the reference sequence corresponding to SEQ ID NO: 386, wherein the amino acid sequence comprises one or more substitutions relative to the reference sequence corresponding to residues 8 to 890 of SEQ ID NO: 386, or relative to the reference sequence corresponding to SEQ ID NO: 386.

[0216] In some embodiments, the engineered RNA polymerase comprises an amino acid sequence having at least 70%, 75%, 80%, 81%, 82%, 83%, 84%, 85%, 86%, 87%, 88%, 89%, 90%, 91%, 92%, 93%, 94%, 95%, 96%, 97%, 98%, 99%, or more sequence identity to a reference sequence corresponding to residues 8 to 890 of an even-numbered SEQ ID NO. of SEQ ID NOs: 388-460, or to a reference sequence corresponding to an even-numbered SEQ ID NO. of SEQ ID NOs: 388-460, wherein the amino acid sequence comprises one or more substitutions relative to the reference sequence corresponding to residues 8 to 890 of SEQ ID NO: 386, or relative to the reference sequence corresponding to SEQ ID NO: 386.

[0217] In some embodiments, the amino acid sequence of the engineered RNA polymerase comprises at least a substitution or substitution set at amino acid position(s) 170/609, 38/185/187/609, 38/185/187, 38/170/173, 38/173/185/187/720, 170/185/187/609, 609, 170/185/187/609/721, 38/609, 38/170/246/609, 185/187/609/718, 38/185/187/609/718/720, 38/170/246/609/718, 720, 246/609, 38/185/187/246/720, 38/609/721, 38/721, 38/720/721, 38/170/609/718/720, 38/718, 38/185/187/609/718/721, 529/609, 38/609/718, 185/187/609/718/720, 185/187/609/718/721, 38/170/718/720/721, 170/185/187/718/720, 38/173/185/187/246/609/720, 609/718/720, 170/185/187/718/720/721, 38/170/173/246/609/718, 246/721, 38/718/720, or 38/609/718/720, wherein the amino acid positions are relative to the reference sequence corresponding to residues 8 to 890 of SEQ ID NO: 386, or relative to the reference sequence corresponding to SEQ ID NO: 386.

[0218] In some embodiments, the amino acid sequence of the engineered RNA polymerases comprises at least a substitution or substitution set, or amino acid residue(s) 170L/609P, 38G/185L/187L/609C, 38G/185L/187H, 38G/170L/173V, 38G/173V/185L/187L/720A, 170L/185L/187H/609C, 609E, 170L/185L/187H/609C/721S, 38G/609E, 170L/185L/187L/609E, 38G/170L/246V/609P, 185L/187H/609E/718S, 38G/185L/187L/609W/718N/720A, 38G/170L/246V/609C/718S, 720A, 246V/609E, 38G/185L/187L/246V/720A, 38G/609C/721S, 38G/721S, 38G/720A/721S, 38G/170L/609C/718S/720A, 38G/718S, 38G/170L/246V/609P/718S, 38G/185L/187L/609P/718S/721S, 529R/609E, 38G/609P/718S, 185L/187L/609C/718S/720A, 185L/187H/609C/718S/721S, 38G/170L/718S/720A/721S, 170L/185L/187L/718s/720A, 38G/173V/185L/187L/246V/609E/720A, 609E/718S/720A, 170L/185L/187H/718s/720A/721S, 38G/170L/173V/246V/609E/718S, 246V/721S, 38G/718S/720A, or 38G/609E/718S/720A, wherein the amino acid positions are relative to the reference sequence corresponding to residues 8 to 890 of SEQ ID NO: 386, or relative to the reference sequence corresponding to SEQ ID NO: 386.

[0219] In some embodiments, the amino acid sequence of the engineered RNA polymerases comprises at least a substitution or substitution set K170L/T609P, R38G/Y185L/K187L/T609C, R38G/Y185L/K187H, R38G/K170L/Y173V, R38G/Y173V/Y185L/K187L/K720A, K170L/Y185L/K187H/T609C, T609E, K170L/Y185L/K187H/T609C/K721S, R38G/T609E, K170L/Y185L/K187L/T609E, R38G/K170L/Q246V/T609P, Y185L/K187H/T609E/K718S, R38G/Y185L/K187L/T609W/K718N/K720A, R38G/K170L/Q246V/T609C/K718S, K720A, Q246V/T609E, R38G/Y185L/K187L/Q246V/K720A, R38G/T609C/K721S, R38G/K721S, R38G/K720A/K721S, R38G/K170L/T609C/K718S/K720A, R38G/K718S, R38G/K170L/Q246V/T609P/K718S, R38G/Y185L/K187L/T609P/K718S/K721S, Q529R/T609E, R38G/T609P/K718S, Y185L/K187L/T609C/K718S/K720A, Y185L/K187H/T609C/K718S/K721S, R38G/K170L/K718S/K720A/K721S, K170L/Y185L/K187L/K718S/K720A, R38G/Y173V/Y185L/K187L/Q246V/T609E/K720A, T609E/K718S/K720A, K170L/Y185L/K187H/K718S/K720A/K721S, R38G/K170L/Y173V/Q246V/T609E/K718S, Q246V/K721S, R38G/K718S/K720A, or R38G/T609E/K718S/K720A, wherein the amino acid positions are relative to the reference sequence corresponding to residues 8 to 890 of SEQ ID NO: 386, or relative to the reference sequence corresponding to SEQ ID NO: 386.

[0220] In some embodiments, the engineered RNA polymerase comprises an amino acid sequence having at least 70%, 75%, 80%, 81%, 82%, 83%, 84%, 85%, 86%, 87%, 88%, 89%, 90%, 91%, 92%, 93%, 94%, 95%, 96%, 97%, 98%, 99%, or more sequence identity to the reference sequence corresponding to residues 8 to 890 of SEQ ID NO: 238, or to the reference sequence corresponding to SEQ ID NO: 238, wherein the amino acid sequence comprises one or more substitutions relative to the reference sequence corresponding to residues 8 to 890 of SEQ ID NO: 238, or relative to the reference sequence corresponding to SEQ ID NO: 238.

[0221] In some embodiments, the engineered RNA polymerase comprises an amino acid sequence having at least 70%, 75%, 80%, 81%, 82%, 83%, 84%, 85%, 86%, 87%, 88%, 89%, 90%, 91%, 92%, 93%, 94%, 95%, 96%, 97%, 98%, 99%, or more sequence identity to the reference sequence corresponding to residues 8 to 890 of an even-numbered SEQ ID NO. of SEQ ID NOs: 462-584, or to the reference sequence corresponding to an even-numbered SEQ ID NO. of SEQ ID NOs: 462-584, wherein the amino acid sequence comprises one or more substitutions relative to the reference sequence corresponding to residues 8 to 890 of SEQ ID NO: 238, or relative to the reference sequence corresponding to SEQ ID NO: 238.

[0222] In some embodiments, the amino acid sequence of the engineered RNA polymerase comprises at least a substitution or substitution set at amino acid position(s) 143, 105, 775/779, 135, 100, 246, 779/782, 749, 237, 162, 83, 218, 227, 115, 274, 81, 122, 61, 32, 139, 75, 239, 257, 240, 69/161, 253, 14, 221, 84, 133/150, 60, 275, 89, 15, 254, 625, 14/67, 21, 93, 250, 217, 19, 95, 759, 62, or 140, wherein the amino acid positions are relative to the reference sequence corresponding to residues 8 to 890 of SEQ ID NO: 238, or relative to the reference sequence corresponding to SEQ ID NO: 238.

[0223] In some embodiments, the amino acid sequence of the engineered RNA polymerases comprises at least a substitution or substitution set, or amino acid residue(s) 143N, 143Q, 143R, 105R, 775R/779R, 135K, 100R, 775K/779R, 246K, 779R/782R, 749R, 237L, 162V, 83K, 218T, 227V, 115L, 274G, 81C, 122I, 61Y, 32S, 139R, 75Y, 239R, 257L, 240M, 69S/161R, 253Y, 14Y, 221C, 84A, 115V, 133C/150Q, 60L, 60G, 32V, 275A, 89Q, 257V, 274L, 15T, 254S, 61W, 625C, 14Q/67R, 21G, 254G, 93Y, 250R, 217V, 60M, 239L, 75S, 32T, 19E, 95Y, 81L, 60R, 759M, 62T, or 140R, wherein the amino acid positions are relative to the reference sequence corresponding to residues 8 to 890 of SEQ ID NO: 238, or relative to the reference sequence corresponding to SEQ ID NO: 238.

[0224] In some embodiments, the amino acid sequence of the engineered RNA polymerases comprises at least a substitution or substitution set A143N, A143Q, A143R, K105R, E775R/H779R, S135K, K100R, E775K/H779R, Q246K, H779R/E782R, P749R, H237L, R162V, T83K, H218T, L227V, E115L, M274G, I81C, A122I, M61Y, A32S, T139R, A75Y, Q239R, Y257L, N240M, G69S/I161R, L253Y, A14Y, V221C, L84A, E115V, L133C/R150Q, K60L, K60G, A32V, F275A, I89Q, Y257V, M274L, K15T, A254S, M61W, G625C, A14Q/K67R, I21G, A254G, N93Y, T250R, I217V, K60M, Q239L, A75S, A32T, S19E, W95Y, I81L, K60R, L759M, F62T, or T140R, wherein the amino acid positions are relative to the reference sequence corresponding to residues 8 to 890 of SEQ ID NO: 238, or relative to the reference sequence corresponding to SEQ ID NO: 238.

[0225] In some embodiments, the engineered RNA polymerase comprises an amino acid sequence having at least 70%, 75%, 80%, 81%, 82%, 83%, 84%, 85%, 86%, 87%, 88%, 89%, 90%, 91%, 92%, 93%, 94%, 95%, 96%, 97%, 98%, 99%, or more sequence identity to the reference sequence corresponding to residues 8 to 890 of SEQ ID NO: 394, or to the reference sequence corresponding to SEQ ID NO: 394, wherein the amino acid sequence comprises one or more substitutions relative to the reference sequence corresponding to residues 8 to 890 of SEQ ID NO: 394, or relative to the reference sequence corresponding to SEQ ID NO: 394.

[0226] In some embodiments, the engineered RNA polymerase comprises an amino acid sequence having at least 70%, 75%, 80%, 81%, 82%, 83%, 84%, 85%, 86%, 87%, 88%, 89%, 90%, 91%, 92%, 93%, 94%, 95%, 96%, 97%, 98%, 99%, or more sequence identity to a reference sequence corresponding to residues 8 to 890 of an even-numbered SEQ ID NO. of SEQ ID NOs: 586-602, or to a reference sequence corresponding to an even-numbered SEQ ID NO. of SEQ ID NOs: 586-602, wherein the amino acid sequence comprises one or more substitutions relative to the reference sequence corresponding to residues 8 to 890 of SEQ ID NO: 394, or relative to the reference sequence corresponding to SEQ ID NO: 394.

[0227] In some embodiments, the amino acid sequence of the engineered RNA polymerase comprises at least a substitution or substitution set at amino acid position(s) 609/779, 246/609, 246, 609/775/779, 105, 143/609/775, 105/135/609/775, or 111/609, 609, wherein the amino acid positions are relative to the reference sequence corresponding to residues 8 to 890 of SEQ ID NO: 394, or relative to the reference sequence corresponding to SEQ ID NO: 394.

[0228] In some embodiments, the amino acid sequence of the engineered RNA polymerases comprises at least a substitution or substitution set, or amino acid residue(s) 609E/779R, 246K/609E, 246K, 609E/775K/779R, 105R, 143N/609E/775K, 105R/135K/609E/775K, 111K/609E, or 609E, wherein the amino acid positions are relative to the reference sequence corresponding to residues 8 to 890 of SEQ ID NO: 394, or relative to the reference sequence corresponding to SEQ ID NO: 394.

[0229] In some embodiments, the amino acid sequence of the engineered RNA polymerases comprises at least a substitution or substitution set T609E/H779R, Q246K/T609E, Q246K, T609E/E775K/H779R, K105R, A143N/T609E/E775K, K105R/S135K/T609E/E775K, Q1I 1K/T609E, or T609E, wherein the amino acid positions are relative to the reference sequence corresponding to residues 8 to 890 of SEQ ID NO: 394, or relative to the reference sequence corresponding to SEQ ID NO: 394.

[0230] In some embodiments, the engineered RNA polymerase comprises an amino acid sequence having at least 70%, 75%, 80%, 81%, 82%, 83%, 84%, 85%, 86%, 87%, 88%, 89%, 90%, 91%, 92%, 93%, 94%, 95%, 96%, 97%, 98%, 99%, or more sequence identity to the reference sequence corresponding to residues 8 to 890 of SEQ ID NO: 588, or to the reference sequence corresponding to SEQ ID NO: 588, wherein the amino acid sequence comprises one or more substitutions relative to the reference sequence corresponding to residues 8 to 890 of SEQ ID NO: 588, or relative to the reference sequence corresponding to SEQ ID NO: 588.

[0231] In some embodiments, the engineered RNA polymerase comprises an amino acid sequence having at least 70%, 75%, 80%, 81%, 82%, 83%, 84%, 85%, 86%, 87%, 88%, 89%, 90%, 91%, 92%, 93%, 94%, 95%, 96%, 97%, 98%, 99%, or more sequence identity to a reference sequence corresponding to residues 8 to 890 of an even-numbered SEQ ID NO. of SEQ ID NOs: 604-680, or to a reference sequence corresponding to an even-numbered SEQ ID NO. of SEQ ID NOs: 604-680, wherein the amino acid sequence comprises one or more substitutions relative to the reference sequence corresponding to residues 8 to 890 of SEQ ID NO: 588, or relative to the reference sequence corresponding to SEQ ID NO: 588.

[0232] In some embodiments, the amino acid sequence of the engineered RNA polymerase comprises at least a substitution or substitution set at amino acid position(s) 32, 531/533, 115, 83, 32/60/61, 55, 589, 357, 617, 172, 598, 56/193, 56, 536, 52, 17, 261, 78, 629, 63, 82, 207, 666, 150, 45, 135, 13, 33, or 245, wherein the amino acid positions are relative to the reference sequence corresponding to residues 8 to 890 of SEQ ID NO: 588, or relative to the reference sequence corresponding to SEQ ID NO: 588.

[0233] In some embodiments, the amino acid sequence of the engineered RNA polymerases comprises at least a substitution or substitution set, or amino acid residue(s) 32V, 531Q/533S, 115L, 83K, 32V/60M/61W, 55D, 589C, 357P, 617R, 172G, 598A, 56G/193G, 56T, 536V, 52T, 17N, 56N, 598K, 261M, 56E, 55S, 536E, 598L, 78S, 56V, 629R, 598R, 63S, 82S, 207S, 598V, 666M, 150Y, 45K, 55W, 135G, 13N, 33E, or 245C, wherein the amino acid positions are relative to the reference sequence corresponding to residues 8 to 890 of SEQ ID NO: 588, or relative to the reference sequence corresponding to SEQ ID NO: 588.

[0234] In some embodiments, the amino acid sequence of the engineered RNA polymerases comprises at least a substitution or substitution set A32V, H531Q/L533S, E115L, T83K, A32V/K60M/M61W, E55D, L589C, E357P, K617R, N172G, D598A, A56G/V193G, A56T, N536V, E52T, D17N, A56N, D598K, I261M, A56E, E55S, N536E, D598L, K78S, A56V, A629R, D598R, E63S, T82S, A207S, D598V, I666M, R150Y, A45K, E55W, S135G, 113N, D33E, or G245C, wherein the amino acid positions are relative to the reference sequence corresponding to residues 8 to 890 of SEQ ID NO: 588, or relative to the reference sequence corresponding to SEQ ID NO: 588.

[0235] In some embodiments, the engineered RNA polymerase comprises an amino acid sequence having at least 70%, 75%, 80%, 81%, 82%, 83%, 84%, 85%, 86%, 87%, 88%, 89%, 90%, 91%, 92%, 93%, 94%, 95%, 96%, 97%, 98%, 99%, or more sequence identity to the reference sequence corresponding to residues 8 to 890 of SEQ ID NO: 604, or to the reference sequence corresponding to SEQ ID NO: 604, wherein the amino acid sequence comprises one or more substitutions relative to the reference sequence corresponding to residues 8 to 890 of SEQ ID NO: 604, or relative to the reference sequence corresponding to SEQ ID NO: 604.

[0236] In some embodiments, the engineered RNA polymerase comprises an amino acid sequence having at least 70%, 75%, 80%, 81%, 82%, 83%, 84%, 85%, 86%, 87%, 88%, 89%, 90%, 91%, 92%, 93%, 94%, 95%, 96%, 97%, 98%, 99%, or more sequence identity to a reference sequence corresponding to residues 8 to 890 of an even-numbered SEQ ID NO. of SEQ ID NOs: 682-704, or to a reference sequence corresponding to an even-numbered SEQ ID NO. of SEQ ID NOs: 682-704, wherein the amino acid sequence comprises one or more substitutions relative to the reference sequence corresponding to residues 8 to 890 of SEQ ID NO: 604, or relative to the reference sequence corresponding to SEQ ID NO: 604.

[0237] In some embodiments, the amino acid sequence of the engineered RNA polymerase comprises at least a substitution or substitution set at amino acid position(s) 207/245/629, 17/56/150/598, 56/629, 536, 185, 56/150, 17/56/150/207/245/598/617/629, 56/150/536/598, 56/536, 185/666, 150, or 143/150/246/782, wherein the amino acid positions are relative to the reference sequence corresponding to residues 8 to 890 of SEQ ID NO: 604, or relative to the reference sequence corresponding to SEQ ID NO: 604.

[0238] In some embodiments, the amino acid sequence of the engineered RNA polymerases comprises at least a substitution or substitution set, or amino acid residue(s) 207S/245C/629R, 17N/56E/150Y/598A, 56E/629R, 536V, 185P, 56T/150Y, 17N/56E/150Y/207S/245C/598A/617R/629R, 56E/150Y/536V/598K, 56V/536V, 185P/666M, 150Y, or 143N/150Y/246V/782V, wherein the amino acid positions are relative to the reference sequence corresponding to residues 8 to 890 of SEQ ID NO: 604, or relative to the reference sequence corresponding to SEQ ID NO: 604.

[0239] In some embodiments, the amino acid sequence of the engineered RNA polymerases comprises at least a substitution or substitution set A207S/G245C/A629R, D17N/A56E/R150Y/D598A, A56E/A629R, N536V, Y185P, A56T/R150Y, D17N/A56E/R150Y/A207S/G245C/D598A/K617R/A629R, A56E/R150Y/N536V/D598K, A56V/N536V, Y185P/I666M, R150Y, or A143N/R150Y/K246V/E782V, wherein the amino acid positions are relative to the reference sequence corresponding to residues 8 to 890 of SEQ ID NO: 604, or relative to the reference sequence corresponding to SEQ ID NO: 604.

[0240] In some embodiments, the engineered RNA polymerase comprises an amino acid sequence having at least 70%, 75%, 80%, 81%, 82%, 83%, 84%, 85%, 86%, 87%, 88%, 89%, 90%, 91%, 92%, 93%, 94%, 95%, 96%, 97%, 98%, 99%, or more sequence identity to the reference sequence corresponding to residues 8 to 890 of SEQ ID NO: 686, or to the reference sequence corresponding to SEQ ID NO: 686, wherein the amino acid sequence comprises one or more substitutions relative to the reference sequence corresponding to residues 8 to 890 of SEQ ID NO: 686, or relative to the reference sequence corresponding to SEQ ID NO: 686.

[0241] In some embodiments, the engineered RNA polymerase comprises an amino acid sequence having at least 70%, 75%, 80%, 81%, 82%, 83%, 84%, 85%, 86%, 87%, 88%, 89%, 90%, 91%, 92%, 93%, 94%, 95%, 96%, 97%, 98%, 99%, or more sequence identity to a reference sequence corresponding to residues 8 to 890 of an even-numbered SEQ ID NO. of SEQ ID NOs: 706-720, or to a reference sequence corresponding to an even-numbered SEQ ID NO. of SEQ ID NOs: 706-720, wherein the amino acid sequence comprises one or more substitutions relative to the reference sequence corresponding to residues 8 to 890 of SEQ ID NO: 686, or relative to the reference sequence corresponding to SEQ ID NO: 686.

[0242] In some embodiments, the amino acid sequence of the engineered RNA polymerase comprises at least a substitution or substitution set at amino acid position(s) 143, 246/424/648/782, 246/659/782, 56/150/629/660/782, 721/782, 782, 196/659/782, or 720/721/782, wherein the amino acid positions are relative to the reference sequence corresponding to residues 8 to 890 of SEQ ID NO: 686, or relative to the reference sequence corresponding to SEQ ID NO: 686.

[0243] In some embodiments, the amino acid sequence of the engineered RNA polymerases comprises at least a substitution or substitution set, or amino acid residue(s) 143N, 246R/424A/648F/782V, 246R/659E/782V, 56T/150Y/629A/660W/782V, 721T/782V, 782V, 196G/659E/782V, or 720S/721A/782V, wherein the amino acid positions are relative to the reference sequence corresponding to residues 8 to 890 of SEQ ID NO: 686, or relative to the reference sequence corresponding to SEQ ID NO: 686.

[0244] In some embodiments, the amino acid sequence of the engineered RNA polymerases comprises at least a substitution or substitution set A143N, K246R/P424A/S648F/E782V, K246R/R659E/E782V, E56T/R150Y/R629A/H660W/E782V, K721T/E782V, E782V, D196G/R659E/E782V, or K720S/K721A/E782V, wherein the amino acid positions are relative to the reference sequence corresponding to residues 8 to 890 of SEQ ID NO: 686, or relative to the reference sequence corresponding to SEQ ID NO: 686.

[0245] In some embodiments, the engineered RNA polymerase comprises an amino acid sequence having at least 70%, 75%, 80%, 81%, 82%, 83%, 84%, 85%, 86%, 87%, 88%, 89%, 90%, 91%, 92%, 93%, 94%, 95%, 96%, 97%, 98%, 99%, or more sequence identity to the reference sequence corresponding to residues 8 to 890 of SEQ ID NO: 692, or to the reference sequence corresponding to SEQ ID NO: 692, wherein the amino acid sequence comprises one or more substitutions relative to the reference sequence corresponding to residues 8 to 890 of SEQ ID NO: 692, or relative to the reference sequence corresponding to SEQ ID NO: 692.

[0246] In some embodiments, the engineered RNA polymerase comprises an amino acid sequence having at least 70%, 75%, 80%, 81%, 82%, 83%, 84%, 85%, 86%, 87%, 88%, 89%, 90%, 91%, 92%, 93%, 94%, 95%, 96%, 97%, 98%, 99%, or more sequence identity to a reference sequence corresponding to residues 8 to 890 of an even-numbered SEQ ID NO. of SEQ ID NOs: 722-730, or to a reference sequence corresponding to an even-numbered SEQ ID NO. of SEQ ID NOs: 722-730, wherein the amino acid sequence comprises one or more substitutions relative to the reference sequence corresponding to residues 8 to 890 of SEQ ID NO: 692, or relative to the reference sequence corresponding to SEQ ID NO: 692.

[0247] In some embodiments, the amino acid sequence of the engineered RNA polymerase comprises at least a substitution or substitution set at amino acid position(s) 143/659/782, 166/171/246/311, 143/721, 782, or 143/171/659/782, wherein the amino acid positions are relative to the reference sequence corresponding to residues 8 to 890 of SEQ ID NO: 692, or relative to the reference sequence corresponding to SEQ ID NO: 692.

[0248] In some embodiments, the amino acid sequence of the engineered RNA polymerases comprises at least a substitution or substitution set, or amino acid residue(s) 143N/659E/782V, 166T/171E/246R/311A, 143N/721T, 782V, or 143N/171E/659E/782V, wherein the amino acid positions are relative to the reference sequence corresponding to residues 8 to 890 of SEQ ID NO: 692, or relative to the reference sequence corresponding to SEQ ID NO: 692.

[0249] In some embodiments, the amino acid sequence of the engineered RNA polymerases comprises at least a substitution or substitution set A143N/R659E/E782V, A166T/K171E/K246R/G311A, A143N/K721T, E782V, or A143N/K171E/R659E/E782V, wherein the amino acid positions are relative to the reference sequence corresponding to residues 8 to 890 of SEQ ID NO: 692, or relative to the reference sequence corresponding to SEQ ID NO: 692.

[0250] In some embodiments, the engineered RNA polymerase comprises an amino acid sequence having at least 70%, 75%, 80%, 81%, 82%, 83%, 84%, 85%, 86%, 87%, 88%, 89%, 90%, 91%, 92%, 93%, 94%, 95%, 96%, 97%, 98%, 99%, or more sequence identity to the reference sequence corresponding to residues 8 to 890 of SEQ ID NO: 712, or to the reference sequence corresponding to SEQ ID NO: 712, wherein the amino acid sequence comprises one or more substitutions relative to the reference sequence corresponding to residues 8 to 890 of SEQ ID NO: 712, or relative to the reference sequence corresponding to SEQ ID NO: 712.

[0251] In some embodiments, the engineered RNA polymerase comprises an amino acid sequence having at least 70%, 75%, 80%, 81%, 82%, 83%, 84%, 85%, 86%, 87%, 88%, 89%, 90%, 91%, 92%, 93%, 94%, 95%, 96%, 97%, 98%, 99%, or more sequence identity to a reference sequence corresponding to residues 8 to 890 of an even-numbered SEQ ID NO. of SEQ ID NOs: 732-802, or to a reference sequence corresponding to an even-numbered SEQ ID NO. of SEQ ID NOs: 732-802, wherein the amino acid sequence comprises one or more substitutions relative to the reference sequence corresponding to residues 8 to 890 of SEQ ID NO: 712, or relative to the reference sequence corresponding to SEQ ID NO: 712.

[0252] In some embodiments, the amino acid sequence of the engineered RNA polymerase comprises at least a substitution or substitution set at amino acid position(s) 367, 382, 670, 672, 357, 388, 693, 397, 375, 137/382/782, 655, 137/382/392, 391, 137/655/721/763, 696, 663, 137/382, 137/382/392/650/655/782, 137/382/629/660/672, 616, 690, 179, 137, 357/382/670, 388/670/672, 357/375, 357/672, 629, or 655/670, wherein the amino acid positions are relative to the reference sequence corresponding to residues 8 to 890 of SEQ ID NO: 712, or relative to the reference sequence corresponding to SEQ ID NO: 712.

[0253] In some embodiments, the amino acid sequence of the engineered RNA polymerases comprises at least a substitution or substitution set, or amino acid residue(s) 367P, 382R, 670R, 382L, 672P, 357P, 388R, 693R, 672S, 397S, 375P, 672G, 137G/382R/782E, 655R, 137G/382R/392A, 391F, 137G/655M/721T/763S, 696L, 672R, 663L, 367T, 367F, 137G/382G, 137G/382G/392R/650M/655M/782E, 137G/382R/629R/660Y/672T, 391S, 616A, 690S, 179N, 137G, 357P/382R/670R, 388R/670R/672P, 357P/375P, 357P/672G, 629K, or 655R/670R, wherein the amino acid positions are relative to the reference sequence corresponding to residues 8 to 890 of SEQ ID NO: 712, or relative to the reference sequence corresponding to SEQ ID NO: 712.

[0254] In some embodiments, the amino acid sequence of the engineered RNA polymerases comprises at least a substitution or substitution set L367P, T382R, K670R, T382L, L672P, E357P, K388R, S693R, L672S, A397S, D375P, L672G, D137G/T382R/V782E, Q655R, D137G/T382R/Y392A, V391F, D137G/Q655M/K721T/R763S, V696L, L672R, Q663L, L367T, L367F, D137G/T382G, D137G/T382G/Y392R/E650M/Q655M/V782E, D137G/T382R/A629R/W660Y/L672T, V391S, V616A, E690S, K179N, D137G, E357P/T382R/K670R, K388R/K670R/L672P, E357P/D375P, E357P/L672G, A629K, or Q655R/K670R, wherein the amino acid positions are relative to the reference sequence corresponding to residues 8 to 890 of SEQ ID NO: 712, or relative to the reference sequence corresponding to SEQ ID NO: 712.

[0255] In some embodiments, the engineered RNA polymerase comprises an amino acid sequence having at least 70%, 75%, 80%, 81%, 82%, 83%, 84%, 85%, 86%, 87%, 88%, 89%, 90%, 91%, 92%, 93%, 94%, 95%, 96%, 97%, 98%, 99%, or more sequence identity to the reference sequence corresponding to residues 8 to 890 of SEQ ID NO: 800, or to the reference sequence corresponding to SEQ ID NO: 800, wherein the amino acid sequence comprises one or more substitutions relative to the reference sequence corresponding to residues 8 to 890 of SEQ ID NO: 800, or relative to the reference sequence corresponding to SEQ ID NO: 800.

[0256] In some embodiments, the engineered RNA polymerase comprises an amino acid sequence having at least 70%, 75%, 80%, 81%, 82%, 83%, 84%, 85%, 86%, 87%, 88%, 89%, 90%, 91%, 92%, 93%, 94%, 95%, 96%, 97%, 98%, 99%, or more sequence identity to a reference sequence corresponding to residues 8 to 890 of an even-numbered SEQ ID NO. of SEQ ID NOs: 804-828, or to a reference sequence corresponding to an even-numbered SEQ ID NO. of SEQ ID NOs: 804-828, wherein the amino acid sequence comprises one or more substitutions relative to the reference sequence corresponding to residues 8 to 890 of SEQ ID NO: 800, or relative to the reference sequence corresponding to SEQ ID NO: 800.

[0257] In some embodiments, the amino acid sequence of the engineered RNA polymerase comprises at least a substitution or substitution set at amino acid position(s) 137, 56/311/382, 56/137/143/721, 137/392, 56/137/392, 56/137/143/404/720, 56/143/246, 56/392, 392/404, 392, 56/137, or 56/196/392, wherein the amino acid positions are relative to the reference sequence corresponding to residues 8 to 890 of SEQ ID NO: 800, or relative to the reference sequence corresponding to SEQ ID NO: 800.

[0258] In some embodiments, the amino acid sequence of the engineered RNA polymerases comprises at least a substitution or substitution set, or amino acid residue(s) 137G, 56E/311A/382R, 56E/137G/143N/721A, 137G/392A, 56E/137G/392A, 56A/137G/143N/404Y/720S, 56E/143N/246R, 56E/392R, 392R/404Y, 392R, 137G/392R, 56E/137G, or 56E/196S/392A, wherein the amino acid positions are relative to the reference sequence corresponding to residues 8 to 890 of SEQ ID NO: 800, or relative to the reference sequence corresponding to SEQ ID NO: 800.

[0259] In some embodiments, the amino acid sequence of the engineered RNA polymerases comprises at least a substitution or substitution set D137G, T56E/G311A/T382R, T56E/D137G/A143N/K721A, D137G/Y392A, T56E/D137G/Y392A, T56A/D137G/A143N/L404Y/K720S, T56E/A143N/K246R, T56E/Y392R, Y392R/L404Y, Y392R, D137G/Y392R, T56E/D137G, or T56E/D196S/Y392A, wherein the amino acid positions are relative to the reference sequence corresponding to residues 8 to 890 of SEQ ID NO: 800, or relative to the reference sequence corresponding to SEQ ID NO: 800.

[0260] In some embodiments, the amino acid sequence of the engineered RNA polymerase comprises at least a substitution at an amino acid position set forth in Tables 5.1, 6.1, 7.1, 8.1, 9.1, 10.1, 11.1, 12.1, 13.1, 14.1, 15.1, 16.1, 17.1, 18.1, 19.1, 23.1, and 24.1, wherein the amino acid positions are relative to the reference sequence corresponding to residues 8 to 890 of SEQ ID NO: 2, 4, 32, 44, 156, 234, 238, 386, 394, 588, 604, 686, 692, 712, or 800, or relative to the reference sequence corresponding to SEQ ID NO: 2, 4, 32, 44, 156, 234, 238, 386, 394, 588, 604, 686, 692, 712, or 800.

[0261] In some embodiments, the amino acid sequence of the engineered RNA polymerase comprises at least a substitution as set forth in Tables 5.1, 6.1, 7.1, 8.1, 9.1, 10.1, 11.1, 12.1, 13.1, 14.1, 15.1, 16.1, 17.1, 18.1, 19.1, 23.1, and 24.1, wherein the amino acid positions are relative to the reference sequence corresponding to residues 8 to 890 of SEQ ID NO: 2, 4, 32, 44, 156, 234, 238, 386, 394, 588, 604, 686, 692, 712, or 800, or relative to the reference sequence corresponding to SEQ ID NO: 2, 4, 32, 44, 156, 234, 238, 386, 394, 588, 604, 686, 692, 712, or 800.

[0262] In some embodiments, the amino acid sequence of the engineered RNA polymerase comprises a substitution or substitution set at amino acid position(s) set forth in Tables 5.1, 6.1, 7.1, 8.1, 9.1, 10.1, 11.1, 12.1, 13.1, 14.1, 15.1, 16.1, 17.1, 18.1, 19.1, 23.1, and 24.1, wherein the amino acid positions are relative to the reference sequence corresponding to residues 8 to 890 of SEQ ID NO: 2, 4, 32, 44, 156, 234, 238, 386, 394, 588, 604, 686, 692, 712, or 800, or relative to the reference sequence corresponding to SEQ ID NO: 2, 4, 32, 44, 156, 234, 238, 386, 394, 588, 604, 686, 692, 712, or 800.

[0263] In some embodiments, the amino acid sequence of the engineered RNA polymerase comprises at least a substitution or substitution set of an engineered RNA polymerase set forth in Tables 5.1, 6.1, 7.1, 8.1, 9.1, 10.1, 11.1, 12.1, 13.1, 14.1, 15.1, 16.1, 17.1, 18.1, 19.1, 23.1, and 24.1, wherein the amino acid positions are relative to the reference sequence corresponding to residues 8 to 890 of SEQ ID NO: 2, 4, 32, 44, 156, 234, 238, 386, 394, 588, 604, 686, 692, 712, or 800, or relative to the reference sequence corresponding to SEQ ID NO: 2, 4, 32, 44, 156, 234, 238, 386, 394, 588, 604, 686, 692, 712, or 800.

[0264] In some embodiments, the engineered RNA polymerase comprises an amino acid sequence having at least 70%, 75%, 80%, 81%, 82%, 83%, 84%, 85%, 86%, 87%, 88%, 89%, 90%, 91%, 92%, 93%, 94%, 95%, 96%, 97%, 98%, 99%, or more sequence identity to a reference sequence comprising a substitution or substitution set as set forth in Tables 5.1, 6.1, 7.1, 8.1, 9.1, 10.1, 11.1, 12.1, 13.1, 14.1, 15.1, 16.1, 17.1, 18.1, 19.1, 23.1, and 24.1, wherein the amino acid positions are relative to the reference sequence corresponding to residues 8 to 890 of SEQ ID NO: 2, 4, 32, 44, 156, 234, 238, 386, 394, 588, 604, 686, 692, 712, or 800, or relative to the reference sequence corresponding to SEQ ID NO: 2, 4, 32, 44, 156, 234, 238, 386, 394, 588, 604, 686, 692, 712, or 800.

[0265] In some embodiments, the amino acid sequence of the engineered RNA polymerase comprises residues 8 to 890 of an amino acid sequence set forth in Tables 5.1, 6.1, 7.1, 8.1, 9.1, 10.1, 11.1, 12.1, 13.1, 14.1, 15.1, 16.1, 17.1, 18.1, 19.1, 23.1, and 24.1, or comprises an amino acid sequence set forth in Tables 5.1, 6.1, 7.1, 8.1, 9.1, 10.1, 11.1, 12.1, 13.1, 14.1, 15.1, 16.1, 17.1, 18.1, 19.1, 23.1, and 24.1.

[0266] In some embodiments, the engineered RNA polymerase comprises an amino acid sequence having at least 70%, 75%, 80%, 81%, 82%, 83%, 84%, 85%, 86%, 87%, 88%, 89%, 90%, 91%, 92%, 93%, 94%, 95%, 96%, 97%, 98%, 99% or more sequence identity to the sequence corresponding to residues 8 to 890 of SEQ ID NO: 4, 6, 8, 10, 12, 14, 16, 18, 20, 22, 24, 26, 28, 30, 32, 34, 36, 38, 40, 42, 44, 46, 48, 50, 52, 54, 56, 58, 60, 62, 64, 66, 68, 70, 72, 74, 76, 78, 80, 82, 84, 86, 88, 90, 92, 94, 96, 98, 100, 102, 104, 106, 108, 110, 112, 114, 116, 118, 120, 122, 124, 126, 128, 130, 132, 134, 136, 138, 140, 142, 144, 146, 148, 150, 152, 154, 156, 158, 160, 162, 164, 166, 168, 170, 172, 174, 176, 178, 180, 182, 184, 186, 188, 190, 192, 194, 196, 198, 200, 202, 204, 206, 208, 210, 212, 214, 216, 218, 220, 222, 224, 226, 228, 230, 232, 234, 236, 238, 240, 242, 244, 246, 248, 250, 252, 254, 256, 258, 260, 262, 264, 266, 268, 270, 272, 274, 276, 278, 280, 282, 284, 286, 288, 290, 292, 294, 296, 298, 300, 302, 304, 306, 308, 310, 312, 314, 316, 318, 320, 322, 324, 326, 328, 330, 332, 334, 336, 338, 340, 342, 344, 346, 348, 350, 352, 354, 356, 358, 360, 362, 364, 366, 368, 370, 372, 374, 376, 378, 380, 382, 384, 386, 388, 390, 392, 394, 396, 398, 400, 402, 404, 406, 408, 410, 412, 414, 416, 418, 420, 422, 424, 426, 428, 430, 432, 434, 436, 438, 440, 442, 444, 446, 448, 450, 452, 454, 456, 458, 460, 462, 464, 466, 468, 470, 472, 474, 476, 478, 480, 482, 484, 486, 488, 490, 492, 494, 496, 498, 400, 402, 404, 406, 408, 410, 412, 414, 416, 418, 420, 422, 424, 426, 428, 430, 432, 434, 436, 438, 440, 442, 444, 446, 448, 450, 452, 454, 456, 458, 460, 462, 464, 466, 468, 470, 472, 474, 476, 478, 480, 482, 484, 486, 488, 490, 492, 494, 496, 498, 500, 502, 504, 506, 508, 510, 512, 514, 516, 518, 520, 522, 524, 526, 528, 530, 532, 534, 536, 538, 540, 542, 544, 546, 548, 550, 552, 554, 556, 558, 560, 562, 564, 566, 568, 570, 572, 574, 576, 578, 580, 582, 584, 586, 588, 590, 592, 594, 596, 598, 600, 602, 604, 606, 608, 610, 612, 614, 616, 618, 620, 622, 624, 626, 628, 630, 632, 634, 636, 638, 640, 642, 644, 646, 648, 650, 652, 654, 656, 658, 660, 662, 664, 666, 668, 670, 672, 674, 676, 678, 680, 682, 684, 686, 688, 690, 692, 694, 696, 698, 700, 702, 704, 706, 708, 710, 712, 714, 716, 718, 720, 722, 724, 276, 728, 730, 732, 734, 736, 738, 740, 742, 744, 746, 748, 750, 752, 754, 756, 758, 760, 762, 764, 766, 768, 770, 772, 774, 776, 778, 780, 782, 784, 786, 788, 790, 792, 794, 796, 798, 800, 802, 804, 806, 808, 810, 812, 814, 816, 818, 820, 822, 824, 826, or 828.

[0267] In some embodiments, the engineered RNA polymerase comprises an amino acid sequence having at least 70%, 75%, 80%, 81%, 82%, 83%, 84%, 85%, 86%, 87%, 88%, 89%, 90%, 91%, 92%, 93%, 94%, 95%, 96%, 97%, 98%, 99% or more sequence identity to the sequence corresponding to SEQ ID NO: 4, 6, 8, 10, 12, 14, 16, 18, 20, 22, 24, 26, 28, 30, 32, 34, 36, 38, 40, 42, 44, 46, 48, 50, 52, 54, 56, 58, 60, 62, 64, 66, 68, 70, 72, 74, 76, 78, 80, 82, 84, 86, 88, 90, 92, 94, 96, 98, 100, 102, 104, 106, 108, 110, 112, 114, 116, 118, 120, 122, 124, 126, 128, 130, 132, 134, 136, 138, 140, 142, 144, 146, 148, 150, 152, 154, 156, 158, 160, 162, 164, 166, 168, 170, 172, 174, 176, 178, 180, 182, 184, 186, 188, 190, 192, 194, 196, 198, 200, 202, 204, 206, 208, 210, 212, 214, 216, 218, 220, 222, 224, 226, 228, 230, 232, 234, 236, 238, 240, 242, 244, 246, 248, 250, 252, 254, 256, 258, 260, 262, 264, 266, 268, 270, 272, 274, 276, 278, 280, 282, 284, 286, 288, 290, 292, 294, 296, 298, 300, 302, 304, 306, 308, 310, 312, 314, 316, 318, 320, 322, 324, 326, 328, 330, 332, 334, 336, 338, 340, 342, 344, 346, 348, 350, 352, 354, 356, 358, 360, 362, 364, 366, 368, 370, 372, 374, 376, 378, 380, 382, 384, 386, 388, 390, 392, 394, 396, 398, 400, 402, 404, 406, 408, 410, 412, 414, 416, 418, 420, 422, 424, 426, 428, 430, 432, 434, 436, 438, 440, 442, 444, 446, 448, 450, 452, 454, 456, 458, 460, 462, 464, 466, 468, 470, 472, 474, 476, 478, 480, 482, 484, 486, 488, 490, 492, 494, 496, 498, 400, 402, 404, 406, 408, 410, 412, 414, 416, 418, 420, 422, 424, 426, 428, 430, 432, 434, 436, 438, 440, 442, 444, 446, 448, 450, 452, 454, 456, 458, 460, 462, 464, 466, 468, 470, 472, 474, 476, 478, 480, 482, 484, 486, 488, 490, 492, 494, 496, 498, 500, 502, 504, 506, 508, 510, 512, 514, 516, 518, 520, 522, 524, 526, 528, 530, 532, 534, 536, 538, 540, 542, 544, 546, 548, 550, 552, 554, 556, 558, 560, 562, 564, 566, 568, 570, 572, 574, 576, 578, 580, 582, 584, 586, 588, 590, 592, 594, 596, 598, 600, 602, 604, 606, 608, 610, 612, 614, 616, 618, 620, 622, 624, 626, 628, 630, 632, 634, 636, 638, 640, 642, 644, 646, 648, 650, 652, 654, 656, 658, 660, 662, 664, 666, 668, 670, 672, 674, 676, 678, 680, 682, 684, 686, 688, 690, 692, 694, 696, 698, 700, 702, 704, 706, 708, 710, 712, 714, 716, 718, 720, 722, 724, 276, 728, 730, 732, 734, 736, 738, 740, 742, 744, 746, 748, 750, 752, 754, 756, 758, 760, 762, 764, 766, 768, 770, 772, 774, 776, 778, 780, 782, 784, 786, 788, 790, 792, 794, 796, 798, 800, 802, 804, 806, 808, 810, 812, 814, 816, 818, 820, 822, 824, 826, or 828.

[0268] In some embodiments, the amino acid sequence of the engineered RNA polymerase comprises residues 8 to 890 of an even numbered SEQ ID NO. of SEQ ID NOs: 4-828, or comprises an even numbered SEQ ID NO. of SEQ ID NOs: 4-828. In some embodiments, the amino acid sequence optionally has 1, 2, 3, 4, 5, 6, 7, 8, 9, or up to 10 amino acid insertions, deletions, or substitutions. In some embodiments, the amino acid sequence optionally has 1, 2, 3, 4, 5, 6, 7, 8, 9, or up to 10 amino acid substitutions. In some embodiments, the amino acid sequence optionally has 1, 2, 3, 4, up to 5 amino acid insertions, deletions, or substitutions. In some embodiments, the amino acid sequence optionally has 1, 2, 3, 4, up to 5 amino acid substitutions. In some embodiments, the amino acid substitutions comprises non-conservative or conservative substitutions. In some embodiments, the amino acid substitutions comprise conservative substitutions.

[0269] In some embodiments, the engineered RNA polymerase comprises an amino acid sequence comprising residues 8 to 890 of SEQ ID NO: 4, 6, 8, 10, 12, 14, 16, 18, 20, 22, 24, 26, 28, 30, 32, 34, 36, 38, 40, 42, 44, 46, 48, 50, 52, 54, 56, 58, 60, 62, 64, 66, 68, 70, 72, 74, 76, 78, 80, 82, 84, 86, 88, 90, 92, 94, 96, 98, 100, 102, 104, 106, 108, 110, 112, 114, 116, 118, 120, 122, 124, 126, 128, 130, 132, 134, 136, 138, 140, 142, 144, 146, 148, 150, 152, 154, 156, 158, 160, 162, 164, 166, 168, 170, 172, 174, 176, 178, 180, 182, 184, 186, 188, 190, 192, 194, 196, 198, 200, 202, 204, 206, 208, 210, 212, 214, 216, 218, 220, 222, 224, 226, 228, 230, 232, 234, 236, 238, 240, 242, 244, 246, 248, 250, 252, 254, 256, 258, 260, 262, 264, 266, 268, 270, 272, 274, 276, 278, 280, 282, 284, 286, 288, 290, 292, 294, 296, 298, 300, 302, 304, 306, 308, 310, 312, 314, 316, 318, 320, 322, 324, 326, 328, 330, 332, 334, 336, 338, 340, 342, 344, 346, 348, 350, 352, 354, 356, 358, 360, 362, 364, 366, 368, 370, 372, 374, 376, 378, 380, 382, 384, 386, 388, 390, 392, 394, 396, 398, 400, 402, 404, 406, 408, 410, 412, 414, 416, 418, 420, 422, 424, 426, 428, 430, 432, 434, 436, 438, 440, 442, 444, 446, 448, 450, 452, 454, 456, 458, 460, 462, 464, 466, 468, 470, 472, 474, 476, 478, 480, 482, 484, 486, 488, 490, 492, 494, 496, 498, 400, 402, 404, 406, 408, 410, 412, 414, 416, 418, 420, 422, 424, 426, 428, 430, 432, 434, 436, 438, 440, 442, 444, 446, 448, 450, 452, 454, 456, 458, 460, 462, 464, 466, 468, 470, 472, 474, 476, 478, 480, 482, 484, 486, 488, 490, 492, 494, 496, 498, 500, 502, 504, 506, 508, 510, 512, 514, 516, 518, 520, 522, 524, 526, 528, 530, 532, 534, 536, 538, 540, 542, 544, 546, 548, 550, 552, 554, 556, 558, 560, 562, 564, 566, 568, 570, 572, 574, 576, 578, 580, 582, 584, 586, 588, 590, 592, 594, 596, 598, 600, 602, 604, 606, 608, 610, 612, 614, 616, 618, 620, 622, 624, 626, 628, 630, 632, 634, 636, 638, 640, 642, 644, 646, 648, 650, 652, 654, 656, 658, 660, 662, 664, 666, 668, 670, 672, 674, 676, 678, 680, 682, 684, 686, 688, 690, 692, 694, 696, 698, 700, 702, 704, 706, 708, 710, 712, 714, 716, 718, 720, 722, 724, 276, 728, 730, 732, 734, 736, 738, 740, 742, 744, 746, 748, 750, 752, 754, 756, 758, 760, 762, 764, 766, 768, 770, 772, 774, 776, 778, 780, 782, 784, 786, 788, 790, 792, 794, 796, 798, 800, 802, 804, 806, 808, 810, 812, 814, 816, 818, 820, 822, 824, 826, or 828. In some embodiments, the amino acid sequence optionally has 1, 2, 3, 4, 5, 6, 7, 8, 9, or up to 10 amino acid insertions, deletions, or substitutions. In some embodiments, the amino acid sequence optionally has 1, 2, 3, 4, 5, 6, 7, 8, 9, or up to 10 amino acid substitutions. In some embodiments, the amino acid sequence optionally has 1, 2, 3, 4, up to 5 amino acid insertions, deletions, or substitutions. In some embodiments, the amino acid sequence optionally has 1, 2, 3, 4, up to 5 amino acid substitutions. In some embodiments, the amino acid substitutions comprises non-conservative or conservative substitutions. In some embodiments, the amino acid substitutions comprise conservative substitutions.

[0270] In some embodiments, the engineered RNA polymerase comprises an amino acid sequence comprising SEQ ID NO: 4, 6, 8, 10, 12, 14, 16, 18, 20, 22, 24, 26, 28, 30, 32, 34, 36, 38, 40, 42, 44, 46, 48, 50, 52, 54, 56, 58, 60, 62, 64, 66, 68, 70, 72, 74, 76, 78, 80, 82, 84, 86, 88, 90, 92, 94, 96, 98, 100, 102, 104, 106, 108, 110, 112, 114, 116, 118, 120, 122, 124, 126, 128, 130, 132, 134, 136, 138, 140, 142, 144, 146, 148, 150, 152, 154, 156, 158, 160, 162, 164, 166, 168, 170, 172, 174, 176, 178, 180, 182, 184, 186, 188, 190, 192, 194, 196, 198, 200, 202, 204, 206, 208, 210, 212, 214, 216, 218, 220, 222, 224, 226, 228, 230, 232, 234, 236, 238, 240, 242, 244, 246, 248, 250, 252, 254, 256, 258, 260, 262, 264, 266, 268, 270, 272, 274, 276, 278, 280, 282, 284, 286, 288, 290, 292, 294, 296, 298, 300, 302, 304, 306, 308, 310, 312, 314, 316, 318, 320, 322, 324, 326, 328, 330, 332, 334, 336, 338, 340, 342, 344, 346, 348, 350, 352, 354, 356, 358, 360, 362, 364, 366, 368, 370, 372, 374, 376, 378, 380, 382, 384, 386, 388, 390, 392, 394, 396, 398, 400, 402, 404, 406, 408, 410, 412, 414, 416, 418, 420, 422, 424, 426, 428, 430, 432, 434, 436, 438, 440, 442, 444, 446, 448, 450, 452, 454, 456, 458, 460, 462, 464, 466, 468, 470, 472, 474, 476, 478, 480, 482, 484, 486, 488, 490, 492, 494, 496, 498, 400, 402, 404, 406, 408, 410, 412, 414, 416, 418, 420, 422, 424, 426, 428, 430, 432, 434, 436, 438, 440, 442, 444, 446, 448, 450, 452, 454, 456, 458, 460, 462, 464, 466, 468, 470, 472, 474, 476, 478, 480, 482, 484, 486, 488, 490, 492, 494, 496, 498, 500, 502, 504, 506, 508, 510, 512, 514, 516, 518, 520, 522, 524, 526, 528, 530, 532, 534, 536, 538, 540, 542, 544, 546, 548, 550, 552, 554, 556, 558, 560, 562, 564, 566, 568, 570, 572, 574, 576, 578, 580, 582, 584, 586, 588, 590, 592, 594, 596, 598, 600, 602, 604, 606, 608, 610, 612, 614, 616, 618, 620, 622, 624, 626, 628, 630, 632, 634, 636, 638, 640, 642, 644, 646, 648, 650, 652, 654, 656, 658, 660, 662, 664, 666, 668, 670, 672, 674, 676, 678, 680, 682, 684, 686, 688, 690, 692, 694, 696, 698, 700, 702, 704, 706, 708, 710, 712, 714, 716, 718, 720, 722, 724, 276, 728, 730, 732, 734, 736, 738, 740, 742, 744, 746, 748, 750, 752, 754, 756, 758, 760, 762, 764, 766, 768, 770, 772, 774, 776, 778, 780, 782, 784, 786, 788, 790, 792, 794, 796, 798, 800, 802, 804, 806, 808, 810, 812, 814, 816, 818, 820, 822, 824, 826, or 828. In some embodiments, the amino acid sequence optionally has 1, 2, 3, 4, 5, 6, 7, 8, 9, or up to 10 amino acid insertions, deletions, or substitutions. In some embodiments, the amino acid sequence optionally has 1, 2, 3, 4, 5, 6, 7, 8, 9, or up to 10 amino acid substitutions. In some embodiments, the amino acid sequence optionally has 1, 2, 3, 4, up to 5 amino acid insertions, deletions, or substitutions. In some embodiments, the amino acid sequence optionally has 1, 2, 3, 4, up to 5 amino acid substitutions. In some embodiments, the amino acid substitutions comprises non-conservative or conservative substitutions. In some embodiments, the amino acid substitutions comprise conservative substitutions.

[0271] In some embodiments, the engineered RNA polymerase of the present disclosure has RNA polymerase activity. In some embodiments, the engineered RNA polymerase has RNA polymerase activity and at least one improved or enhanced properties as compared to a reference RNA polymerase.

[0272] In some embodiments, the engineered RNA polymerase has increased RNA polymerase activity compared to the reference RNA polymerase. In some embodiments, the engineered RNA polymerase 1.1, 1.2, 1.3, 1.4, 1.5, 2, 2.5, 3, 4, 5, 6, 7, 8, 9, 10, 15, 20, 25, 30, 35 or 40 fold, or more increased activity as compared to the reference RNA polymerase. In some embodiments, the increased activity is described as increased processivity.

[0273] In some embodiments, the engineered RNA polymerase has increased thermostability as compared to the reference RNA polymerase. In some embodiments, the engineered RNA polymerase has increased thermostability at temperatures 33° C. or greater as compared to the reference RNA polymerase.

[0274] In some embodiments, the engineered RNA polymerase has increased product integrity as compared to the reference RNA polymerase. In some embodiments, product integrity is the percent of desired RNA product over the total RNA produced in a transcription reaction, e.g., in vitro transcription reaction. In reference to the methods in the Examples, product integrity is the area of the desired full-length RNA electrophoretic peak divided by the total area of the electropherogram trace through Fragment Analyzer. In some embodiments, an increase in product integrity is characterized by increase in purity of the full length RNA product made in an in vitro transcription reaction as compared to that of a reference in vitro transcription reaction, e.g., under different conditions and/or different RNA polymerase. In some embodiments, the engineered RNA polymerase has at least 1.1, 1.2, 1.3, 1.4, 1.5, 2, 2.5, 3, 3.5, or 4 fold increased in product integrity as compared to the reference RNA polymerase.

[0275] In some embodiments, the reference RNA polymerase has the sequence corresponding to residues 8 to 890 of SEQ ID NO: 2, 4, 32, 44, 156, 234, 238, 386, 394, 588, 604, 686, 692, 712, or 800, or the sequence corresponding to SEQ ID NO: 2, 4, 32, 44, 156, 234, 238, 386, 394, 588, 604, 686, 692, 712, or 800. In some embodiments, the reference RNA polymerase has the sequence corresponding to residues 8 to 890 of SEQ ID NO: 2, or the sequence corresponding to SEQ ID NO: 2.

[0276] In some embodiments, the engineered RNA polymerase has an improved property selected from i) increased activity, ii) increased thermostability, iii) increased processivity, or iv) increased RNA product integrity, or any combination of i), ii), iii) and iv), as compared to a reference RNA polymerase. In some embodiments, the reference RNA polymerase has the sequence corresponding to residues 8 to 890 of SEQ ID NO: 2, 4, 32, 44, 156, 234, 238, 386, 394, 588, 604, 686, 692, 712, or 800, or the sequence corresponding to SEQ ID NO: 2, 4, 32, 44, 156, 234, 238, 386, 394, 588, 604, 686, 692, 712, or 800. In some embodiments, the reference RNA polymerase has the sequence corresponding to residues 8 to 890 of SEQ ID NO: 2, or the sequence corresponding to SEQ ID NO: 2.

[0277] In some embodiments, the engineered RNA polymerase is expressed as a fusion protein. In some embodiments, the engineered RNA polymerase described herein can be fused to a variety of polypeptide sequences, such as, by way of example and not limitation, polypeptide tags that can be used for detection and/or purification. In some embodiments, the fusion protein of the engineered RNA polymerase comprises a glycine-histidine or histidine-tag (His-tag). In some embodiments, the engineered RNA polymerase comprises a polylysine, e.g., 2-12 lysine units, such as for conjugation to a support medium. In some embodiments, the fusion protein of the engineered RNA polymerase comprises an epitope tag, such as c-myc, FLAG, V5, or hemagglutinin (HA). In some embodiments, the fusion protein of the engineered RNA polymerase comprises a GST, SUMO, Strep, MBP, or GFP tag. In some embodiments, the fusion is to the amino (N-) terminus of engineered RNA polymerase polypeptide. In some embodiments, the fusion is to the carboxy (C-) terminus of the engineered RNA polymerase polypeptide.

[0278] In some embodiments, the engineered RNA polymerase polypeptide described herein is an isolated composition. In some embodiments, the engineered RNA polymerase polypeptide is substantially purified, or purified as further discussed herein.

[0279] In some embodiments, the present disclosure further provides functional fragments or biologically active fragments of engineered RNA polymerase polypeptides described herein. Thus, for each and every embodiment herein of an engineered RNA polymerase, a functional fragment or biologically active fragment of the engineered RNA polymerase is provided herewith (e.g., an engineered RNA polymerase provided in Tables 5.1, 6.1, 7.1, 8.1, 9.1, 10.1, 11.1, 12.1, 13.1, 14.1, 15.1, 16.1, 17.1, 18.1, 19.1, 23.1, and 24.1). In some embodiments, a functional fragment or biologically active fragments of an engineered RNA polymerase comprises at least 90%, at least 91%, at least 92%, at least 93%, at least 94%, at least 95%, at least 96%, at least 97%, at least 98%, or at least 99% of the activity of the RNA polymerase polypeptide from which it was derived (i.e., the parent RNA polymerase). In some embodiments, functional fragments or biologically active fragments comprise at least 70%, 75%, 80%, 81%, 82%, 83%, 84%, 85%, 90%, 91%, 92%, 93%, 94%, 95%, 96%, 97%, 98%, or 99% of the parent sequence of the RNA polymerase. In some embodiments, the functional fragment will be truncated by less than 5, less than 10, less than 15, less than 10, less than 25, less than 30, less than 35, less than 40, less than 45, less than 50 amino acids, less than 55 amino acids, less than 60 amino acids, less than 65 amino acids, or less than 70 amino acids.

[0280] In some embodiments, the functional fragments or biologically active fragments of the engineered RNA polymerase polypeptide described herein include at least a mutation or mutation set in the amino acid sequence of the engineered RNA polymerase described herein. Accordingly, in some embodiments, the functional fragments or biologically active fragments of the engineered RNA polymerase displays the enhanced or improved property associated with the mutation or mutation set in the parent RNA polymerase.

### Polynucleotides Encoding Engineered Polypeptides, Expression Vectors and Host Cells

[0281] In another aspect, the present disclosure provides recombinant polynucleotides encoding the engineered RNA polymerases described herein. In some embodiments, the recombinant polynucleotides are operably linked to one or more heterologous regulatory sequences that control gene expression to create a recombinant polynucleotide construct capable of expressing the engineered RNA polymerase. In some embodiments, an expression construct containing at least one heterologous polynucleotide encoding the engineered RNA polymerase polypeptide(s) is introduced into appropriate host cells to express the corresponding RNA polymerase polypeptide(s).

[0282] As will be apparent to the skilled artisan, the availability of a protein sequence and the knowledge of the codons corresponding to the various amino acids provide a description of all the polynucleotides capable of encoding the subject polypeptides. The degeneracy of the genetic code, where the same amino acids are encoded by alternative or synonymous codons, allows an extremely large number of nucleic acids to be made, all of which encode an engineered RNA polymerase of the present disclosure. Thus, the present disclosure provides methods and compositions for the production of each and every possible variation of polynucleotides that could be made that encode the engineered RNA polymerase polypeptides described herein by selecting combinations based on the possible codon choices, and all such polynucleotide variants are to be considered specifically disclosed for any polypeptide described herein, including the amino acid sequences presented in the Examples (e.g., Tables 5.1, 6.1, 7.1, 8.1, 9.1, 10.1, 11.1, 12.1, 13.1, 14.1, 15.1, 16.1, 17.1, 18.1, 19.1, 23.1, and 24.1) and in the Sequence Listing.

[0283] In some embodiments, the codons are preferably optimized for utilization by the chosen host cell for protein production. In some embodiments, preferred codons in bacteria are used for expression in bacteria. In some embodiments, preferred codons in fungal cells are used for expression in fungal cells. In some embodiments, preferred codons in insect cells are used for expression in insect cells. In some embodiments, preferred codons in mammalian cells are used for expression in mammalian cells. In some embodiments, codon optimized polynucleotides encoding an engineered RNA polymerase polypeptide described herein contain preferred codons at about 40%, 50%, 60%, 70%, 80%, 90%, or greater than 90% of the codon positions in the full-length coding region.

[0284] Accordingly, in some embodiments, a recombinant polynucleotide of the present disclosure comprises a polynucleotide sequence encoding an engineered RNA polymerase polypeptide described herein. In some embodiments, the polynucleotide sequence of the recombinant polynucleotide is codon optimized. In some embodiments, the polynucleotide sequence of the recombinant polynucleotide is codon optimized for expression in bacterial cells.

[0285] In some embodiments, the recombinant polynucleotide comprises a polynucleotide sequence encoding an engineered RNA polymerase comprising an amino acid sequence having at least 70%, 75%, 80%, 81%, 82%, 83%, 84%, 85%, 86%, 87%, 88%, 89%, 90%, 91%, 92%, 93%, 94%, 95%, 96%, 97%, 98%, 99%, or more sequence identity to a reference sequence corresponding to residues 8 to 890 of SEQ ID NO: 2, 4, 32, 44, 156, 234, 238, 386, 394, 588, 604, 686, 692, 712, or 800, or to a reference sequence corresponding to SEQ ID NO: 2, 4, 32, 44, 156, 234, 238, 386, 394, 588, 604, 686, 692, 712, or 800, wherein the amino acid sequence comprises one or more substitutions relative to the reference sequence corresponding to residues 8 to 890 of SEQ ID NO: 2, 4, 32, 44, 156, 234, 238, 386, 394, 588, 604, 686, 692, 712, or 800, or relative to the reference sequence corresponding to SEQ ID NO: 2, 4, 32, 44, 156, 234, 238, 386, 394, 588, 604, 686, 692, 712, or 800.

[0286] In some embodiments, the recombinant polynucleotide comprises a polynucleotide sequence encoding an engineered RNA polymerase comprising an amino acid sequence having at least 70%, 75%, 80%, 81%, 82%, 83%, 84%, 85%, 86%, 87%, 88%, 89%, 90%, 91%, 92%, 93%, 94%, 95%, 96%, 97%, 98%, 99%, or more sequence identity to the reference sequence corresponding to residues 8 to 890 of SEQ ID NO: 2, or to the reference sequence corresponding to SEQ ID NO: 2, wherein the amino acid sequence comprises one or more substitutions relative to the reference sequence corresponding to residues 8 to 890 of SEQ ID NO: 2, or relative to the reference sequence corresponding to SEQ ID NO: 2.

[0287] In some embodiments, the recombinant polynucleotide comprises a polynucleotide sequence encoding an engineered RNA polymerase comprising an amino acid sequence having at least 70%, 75%, 80%, 81%, 82%, 83%, 84%, 85%, 86%, 87%, 88%, 89%, 90%, 91%, 92%, 93%, 94%, 95%, 96%, 97%, 98%, 99%, or more sequence identity to the reference sequence corresponding to residues 8 to 890 of SEQ ID NO: 4, 32, 44, 156, 234, 238, 386, 394, 588, 604, 686, 692, 712, or 800, or to the reference sequence corresponding to SEQ ID NO: 4, 32, 44, 156, 234, 238, 386, 394, 588, 604, 686, 692, 712, or 800, wherein the amino acid sequence comprises one or more substitutions relative to the reference sequence corresponding to residues 8 to 890 of SEQ ID NO: 2, or relative to the reference sequence corresponding to SEQ ID NO: 2.

[0288] In some embodiments, the recombinant polynucleotide comprises a polynucleotide sequence encoding an engineered RNA polymerase comprising an amino acid sequence having at least 70%, 75%, 80%, 81%, 82%, 83%, 84%, 85%, 86%, 87%, 88%, 89%, 90%, 91%, 92%, 93%, 94%, 95%, 96%, 97%, 98%, 99% or more sequence identity to the sequence corresponding to residues 8 to 890 of an even numbered SEQ ID NO. of SEQ ID NOs: 4-828, or to the sequence corresponding to an even numbered SEQ ID NO. of SEQ ID NOs: 4-828, wherein the amino acid sequence comprises one or more substitutions relative to the reference sequence corresponding to residues 8 to 890 of SEQ ID NO: 2, or relative to the reference sequence corresponding to SEQ ID NO: 2.

[0289] In some embodiments, the recombinant polynucleotide comprises a polynucleotide sequence encoding an engineered RNA polymerase comprising an amino acid sequence comprising at least a substitution at amino acid position 13, 14, 15, 17, 19, 21, 32, 33, 38, 45, 52, 54, 55, 56, 56, 57, 60, 61, 62, 63, 67, 69, 72, 75, 78, 81, 82, 83, 84, 89, 93, 95, 100, 105, 111, 115, 122, 124, 127, 131, 133, 135, 137, 138, 139, 140, 141, 143, 150, 160, 161, 162, 164, 166, 168, 169, 170, 171, 172, 173, 179, 185, 187, 193, 196, 207, 212, 217, 218, 221, 227, 237, 239, 240, 245, 246, 250, 253, 254, 257, 261, 272, 274, 275, 311, 336, 340, 342, 351, 357, 367, 375, 379, 382, 388, 391, 392, 394, 397, 401, 402, 403, 404, 419, 424, 437, 440, 494, 510, 514, 517, 527, 529, 530, 531, 533, 536, 589, 594, 598, 607, 609, 615, 616, 617, 625, 629, 648, 650, 655, 659, 660, 663, 664, 666, 670, 672, 690, 693, 696, 718, 720, 721, 749, 759, 763, 773, 775, 779, 782, 782, 810, 854, 857, 867, 875, or 878, or combinations thereof, wherein the amino acid positions are relative to the reference sequence corresponding to residues 8 to 890 of SEQ ID NO: 2, or relative to the reference sequence corresponding to SEQ ID NO: 2.

[0290] In some embodiments, the recombinant polynucleotide comprises a polynucleotide sequence encoding the engineered RNA polymerase comprising an amino acid sequence comprising at least a substitution at amino acid position 32, 38, 56, 138, 150, 170, 171, 173, 246, 311, 336, 340, 357, 388, 394, 401, 404, 437, 514, 536, 609, 629, 659, 660, 664, 779, or 782, or combinations thereof, wherein the amino acid positions are relative to the reference sequence corresponding to residues 8 to 890 of SEQ ID NO: 2, or relative to the reference sequence corresponding to SEQ ID NO: 2.

[0291] In some embodiments, the recombinant polynucleotide comprises a polynucleotide sequence encoding the engineered RNA polymerase comprising an amino acid sequence comprising at least a substitution or substitution set at amino acid position(s) 401/404, 336, 138, 401/403/404, 336/510, 388, 340, 401/402/404, or 351/357, wherein the amino acid positions are relative to the reference sequence corresponding to residues 8 to 890 of SEQ ID NO: 2, or relative to the reference sequence corresponding to SEQ ID NO: 2.

[0292] In some embodiments, the recombinant polynucleotide comprises a polynucleotide sequence encoding the RNA polymerase comprising an amino acid sequence comprising at an amino acid position set forth in Tables 5.1, 6.1, 7.1, 8.1, 9.1, 10.1, 11.1, 12.1, 13.1, 14.1, 15.1, 16.1, 17.1, 18.1, 19.1, 23.1, and 24.1, wherein the amino acid positions are relative to the reference sequence corresponding to residues 8 to 890 of SEQ ID NO: 2, or relative to the reference sequence corresponding to SEQ ID NO: 2.

[0293] In some embodiments, the recombinant polynucleotide comprises a polynucleotide sequence encoding the RNA polymerase comprising an amino acid sequence comprising at least a substitution set forth in Tables 5.1, 6.1, 7.1, 8.1, 9.1, 10.1, 11.1, 12.1, 13.1, 14.1, 15.1, 16.1, 17.1, 18.1, 19.1, 23.1, and 24.1, wherein the amino acid positions are relative to the reference sequence corresponding to residues 8 to 890 of SEQ ID NO: 2, or relative to the reference sequence corresponding to SEQ ID NO: 2.

[0294] In some embodiments, the recombinant polynucleotide comprises a polynucleotide sequence encoding the RNA polymerase comprising an amino acid sequence comprising at least a substitution or substitution set at amino acid position(s) set forth in Tables 5.1, 6.1, 7.1, 8.1, 9.1, 10.1, 11.1, 12.1, 13.1, 14.1, 15.1, 16.1, 17.1, 18.1, 19.1, 23.1, and 24.1, wherein the amino acid positions are relative to the reference sequence corresponding to residues 8 to 890 of SEQ ID NO: 2, or relative to the reference sequence corresponding to SEQ ID NO: 2.

[0295] In some embodiments, the recombinant polynucleotide comprises a polynucleotide sequence encoding an RNA polymerase comprising an amino acid sequence comprising at least a substitution or substitution set of an engineered RNA polymerase set forth in Tables 5.1, 6.1, 7.1, 8.1, 9.1, 10.1, 11.1, 12.1, 13.1, 14.1, 15.1, 16.1, 17.1, 18.1, 19.1, 23.1, and 24.1, wherein the amino acid positions are relative to the reference sequence corresponding to residues 8 to 890 of SEQ ID NO: 2, or relative to the reference sequence corresponding to SEQ ID NO: 2.

[0296] In some embodiments, the recombinant polynucleotide comprises a polynucleotide sequence encoding an engineered RNA polymerase comprising an amino acid sequence having at least 70%, 75%, 80%, 81%, 82%, 83%, 84%, 85%, 86%, 87%, 88%, 89%, 90%, 91%, 92%, 93%, 94%, 95%, 96%, 97%, 98%, 99%, or more sequence identity to the reference sequence corresponding to residues 8 to 890 of SEQ ID NO: 4, 32, 44, 156, 234, 238, 386, 394, 588, 604, 686, 692, 712, or 800, or to the reference sequence corresponding to SEQ ID NO: 4, 32, 44, 156, 234, 238, 386, 394, 588, 604, 686, 692, 712, or 800.

[0297] In some embodiments, the recombinant polynucleotide comprising a polynucleotide sequence encoding the engineered RNA polymerase comprising an amino acid sequence having at least 70%, 75%, 80%, 81%, 82%, 83%, 84%, 85%, 86%, 87%, 88%, 89%, 90%, 91%, 92%, 93%, 94%, 95%, 96%, 97%, 98%, 99% or more sequence identity to the sequence corresponding to residues 8 to 890 of an even numbered SEQ ID NO. of SEQ ID NOs: 4-828, or to the sequence corresponding to an even numbered SEQ ID NO. of SEQ ID NOs: 4-828.

[0298] In some embodiments, the recombinant polynucleotide comprises a polynucleotide sequence encoding an engineered RNA polymerase comprising an amino acid sequence having at least 70%, 75%, 80%, 81%, 82%, 83%, 84%, 85%, 86%, 87%, 88%, 89%, 90%, 91%, 92%, 93%, 94%, 95%, 96%, 97%, 98%, 99%, or more sequence identity to the reference sequence corresponding to residues 8 to 890 of SEQ ID NO: 4, 32, 44, 156, 234, 238, 386, 394, 588, 604, 686, 692, 712, or 800, or to the reference sequence corresponding to SEQ ID NO: 4, 32, 44, 156, 234, 238, 386, 394, 588, 604, 686, 692, 712, or 800, wherein the amino acid sequence comprises one or more substitutions relative to the reference sequence corresponding to residues 8 to 890 of SEQ ID NO: 4, 32, 44, 156, 234, 238, 386, 394, 588, 604, 686, 692, 712, or 800, or relative to the reference sequence corresponding to SEQ ID NO: 4, 32, 44, 156, 234, 238, 386, 394, 588, 604, 686, 692, 712, or 800.

[0299] In some embodiments, the recombinant polynucleotide comprises a polynucleotide sequence encoding an engineered RNA polymerase comprising an amino acid sequence having at least 70%, 75%, 80%, 81%, 82%, 83%, 84%, 85%, 86%, 87%, 88%, 89%, 90%, 91%, 92%, 93%, 94%, 95%, 96%, 97%, 98%, 99%, or more sequence identity to the reference sequence corresponding to residues 8 to 890 of an even-numbered SEQ ID NO. of SEQ ID NOs: 4-828, or to the reference sequence corresponding to an even-numbered SEQ ID NO. of SEQ ID NOs: 4-828, wherein the amino acid sequence comprises one or more substitutions relative to the reference sequence corresponding to residues 8 to 890 of SEQ ID NO: 4, 32, 44, 156, 234, 238, 386, 394, 588, 604, 686, 692, 712, or 800, or relative to the reference sequence corresponding to SEQ ID NO: 4, 32, 44, 156, 234, 238, 386, 394, 588, 604, 686, 692, 712, or 800.

[0300] In some embodiments, the recombinant polynucleotide comprises a polynucleotide sequence encoding the engineered RNA polymerase comprising an amino acid sequence comprising at least a substitution at amino acid position 13, 14, 15, 17, 19, 21, 32, 33, 38, 45, 52, 54, 55, 56, 56, 57, 60, 61, 62, 63, 67, 69, 72, 75, 78, 81, 82, 83, 84, 89, 93, 95, 100, 105, 111, 115, 122, 124, 127, 131, 133, 135, 137, 138, 139, 140, 141, 143, 150, 160, 161, 162, 164, 166, 168, 169, 170, 171, 172, 173, 179, 185, 187, 193, 196, 207, 212, 217, 218, 221, 227, 237, 239, 240, 245, 246, 250, 253, 254, 257, 261, 272, 274, 275, 311, 336, 340, 342, 351, 357, 367, 375, 379, 382, 388, 391, 392, 394, 397, 401, 402, 403, 404, 419, 424, 437, 440, 494, 510, 514, 517, 527, 529, 530, 531, 533, 536, 589, 594, 598, 607, 609, 615, 616, 617, 625, 629, 648, 650, 655, 659, 660, 663, 664, 666, 670, 672, 690, 693, 696, 718, 720, 721, 749, 759, 763, 773, 775, 779, 782, 782, 810, 854, 857, 867, 875, or 878, or combinations thereof, wherein the amino acid positions are relative to the reference sequence corresponding to residues 8 to 890 of SEQ ID NO: 4, 32, 44, 156, 234, 238, 386, 394, 588, 604, 686, 692, 712, or 800, or relative to the reference sequence corresponding to SEQ ID NO: 4, 32, 44, 156, 234, 238, 386, 394, 588, 604, 686, 692, 712, or 800.

[0301] In some embodiments, the recombinant polynucleotide comprises a polynucleotide sequence encoding an engineered RNA polymerase comprising an amino acid sequence comprising at least a substitution at amino acid position 32, 38, 56, 138, 150, 170, 171, 173, 246, 311, 336, 340, 357, 388, 394, 401, 404, 437, 514, 536, 609, 629, 659, 660, 664, 779, or 782, or combinations thereof, wherein the amino acid positions are relative to the reference sequence corresponding to residues 8 to 890 of SEQ ID NO: 4, 32, 44, 156, 234, 238, 386, 394, 588, 604, 686, 692, 712, or 800, or relative to the reference sequence corresponding to SEQ ID NO: 4, 32, 44, 156, 234, 238, 386, 394, 588, 604, 686, 692, 712, or 800.

[0302] In some embodiments, the recombinant polynucleotide comprises a polynucleotide sequence encoding an engineered RNA polymerase comprising an amino acid sequence having at least 70%, 75%, 80%, 81%, 82%, 83%, 84%, 85%, 86%, 87%, 88%, 89%, 90%, 91%, 92%, 93%, 94%, 95%, 96%, 97%, 98%, 99%, or more sequence identity to the reference sequence corresponding to residues 8 to 890 of SEQ ID NO: 4, or to the reference sequence corresponding to SEQ ID NO: 4, wherein the amino acid sequence comprises one or more substitutions relative to the reference sequence corresponding to residues 8 to 890 of SEQ ID NO: 4, or relative to the reference sequence corresponding to SEQ ID NO: 4.

[0303] In some embodiments, the recombinant polynucleotide comprises a polynucleotide sequence encoding an engineered RNA polymerase comprising an amino acid sequence having at least 70%, 75%, 80%, 81%, 82%, 83%, 84%, 85%, 86%, 87%, 88%, 89%, 90%, 91%, 92%, 93%, 94%, 95%, 96%, 97%, 98%, 99%, or more sequence identity to a reference sequence corresponding to residues 8 to 890 of an even-numbered SEQ ID NO. of SEQ ID NOs: 28-40, or to a reference sequence corresponding to an even-numbered SEQ ID NO. of SEQ ID NOs: 28-40, wherein the amino acid sequence comprises one or more substitutions relative to the reference sequence corresponding to residues 8 to 890 of SEQ ID NO: 4, or relative to the reference sequence corresponding to SEQ ID NO: 4.

[0304] In some embodiments, the recombinant polynucleotide comprises a polynucleotide sequence encoding an engineered RNA polymerase comprising an amino acid sequence comprising at least a substitution set at amino acid position(s) 311/388/404/440, 138/340, 138/311/336/340/388, 311/388/440, 138/311/340/388/404/440, 138/336/342, or 351/388, wherein the amino acid positions are relative to the reference sequence corresponding to residues 8 to 890 of SEQ ID NO: 4, or relative to the reference sequence corresponding to SEQ ID NO: 4.

[0305] In some embodiments, the recombinant polynucleotide comprises a polynucleotide sequence encoding an engineered RNA polymerase comprising an amino acid sequence having at least 70%, 75%, 80%, 81%, 82%, 83%, 84%, 85%, 86%, 87%, 88%, 89%, 90%, 91%, 92%, 93%, 94%, 95%, 96%, 97%, 98%, 99%, or more sequence identity to the reference sequence corresponding to residues 8 to 890 of SEQ ID NO: 32, or to the reference sequence corresponding to SEQ ID NO: 32, wherein the amino acid sequence comprises one or more substitutions relative to the reference sequence corresponding to residues 8 to 890 of SEQ ID NO: 32, or relative to the reference sequence corresponding to SEQ ID NO: 32.

[0306] In some embodiments, the recombinant polynucleotide comprises a polynucleotide sequence encoding an engineered RNA polymerase comprising an amino acid sequence having at least 70%, 75%, 80%, 81%, 82%, 83%, 84%, 85%, 86%, 87%, 88%, 89%, 90%, 91%, 92%, 93%, 94%, 95%, 96%, 97%, 98%, 99%, or more sequence identity to a reference sequence corresponding to residues 8 to 890 of an even-numbered SEQ ID NO. of SEQ ID NOs: 42-188, or to a reference sequence corresponding to an even-numbered SEQ ID NO. of SEQ ID NOs: 42-188, wherein the amino acid sequence comprises one or more substitutions relative to the reference sequence corresponding to residues 8 to 890 of SEQ ID NO: 32, or relative to the reference sequence corresponding to SEQ ID NO: 32.

[0307] In some embodiments, the recombinant polynucleotide comprises a polynucleotide sequence encoding an engineered RNA polymerase comprising an amino acid sequence comprising at least a substitution or substitution set at amino acid position(s) 514, 38/514, 38/394/514, 38/394/514/664, 394/514/875, 394/514, 38/124/394/514, 171/878, 170, 173, 172, 170/629, 171, 168, 166, 166/272/274/275, 169, 207, 168/217/218, 171/530, 382, 773, 670, 379, 392, 419, 57, 164, 810, 659, 54, 172/173/514/659/660, 170/171/172/514/659, 173/514/659/660, 173/514/659/810, 170/340/514/659/660/810, 170/171/173/336/340/514/659/660, 57/171/173/514/659/660/810, 170/173/514/659/660/810, 57/171/172/336/340/514/659, 173/514, 171/172/173/514/659/660, 57/170/171/173/514/659/660/810, 57/173/514, 172/173/514/857, 57/173/340/514, 170/171/173/336/514, 171/514, 57/170/173/336/514, 170/336, 173/514/659, 57/514, or 173/810, wherein the amino acid positions are relative to the reference sequence corresponding to residues 8 to 890 of SEQ ID NO: 32, or relative to the reference sequence corresponding to SEQ ID NO: 32.

[0308] In some embodiments, the recombinant polynucleotide comprises a polynucleotide sequence encoding an engineered RNA polymerase comprising an amino acid sequence having at least 70%, 75%, 80%, 81%, 82%, 83%, 84%, 85%, 86%, 87%, 88%, 89%, 90%, 91%, 92%, 93%, 94%, 95%, 96%, 97%, 98%, 99%, or more sequence identity to the reference sequence corresponding to residues 8 to 890 of SEQ ID NO: 44, or to the reference sequence corresponding to SEQ ID NO: 44, wherein the amino acid sequence comprises one or more substitutions relative to the reference sequence corresponding to residues 8 to 890 of SEQ ID NO: 44, or relative to the reference sequence corresponding to SEQ ID NO: 44.

[0309] In some embodiments, the recombinant polynucleotide comprises a polynucleotide sequence encoding an engineered RNA polymerase comprising an amino acid sequence having at least 70%, 75%, 80%, 81%, 82%, 83%, 84%, 85%, 86%, 87%, 88%, 89%, 90%, 91%, 92%, 93%, 94%, 95%, 96%, 97%, 98%, 99%, or more sequence identity to a reference sequence corresponding to residues 8 to 890 of an even-numbered SEQ ID NO. of SEQ ID NOs: 190-194, or to a reference sequence corresponding to an even-numbered SEQ ID NO. of SEQ ID NOs: 190-194, wherein the amino acid sequence comprises one or more substitutions relative to the reference sequence corresponding to residues 8 to 890 of SEQ ID NO: 44, or relative to the reference sequence corresponding to SEQ ID NO: 44.

[0310] In some embodiments, the recombinant polynucleotide comprises a polynucleotide sequence encoding an engineered RNA polymerase comprising an amino acid sequence comprising at least a substitution or substitution set at amino acid position(s) 336, 143/336/340/782, or 143/336/340/357/514, wherein the amino acid positions are relative to the reference sequence corresponding to residues 8 to 890 of SEQ ID NO: 44, or relative to the reference sequence corresponding to SEQ ID NO: 44.

[0311] In some embodiments, the recombinant polynucleotide comprises a polynucleotide sequence encoding an engineered RNA polymerase comprising an amino acid sequence having at least 70%, 75%, 80%, 81%, 82%, 83%, 84%, 85%, 86%, 87%, 88%, 89%, 90%, 91%, 92%, 93%, 94%, 95%, 96%, 97%, 98%, 99%, or more sequence identity to the reference sequence corresponding to residues 8 to 890 of SEQ ID NO: 156, or to the reference sequence corresponding to SEQ ID NO: 156, wherein the amino acid sequence comprises one or more substitutions relative to the reference sequence corresponding to residues 8 to 890 of SEQ ID NO: 156, or relative to the reference sequence corresponding to SEQ ID NO: 156.

[0312] In some embodiments, the recombinant polynucleotide comprises a polynucleotide sequence encoding an engineered RNA polymerase comprising an amino acid sequence having at least 70%, 75%, 80%, 81%, 82%, 83%, 84%, 85%, 86%, 87%, 88%, 89%, 90%, 91%, 92%, 93%, 94%, 95%, 96%, 97%, 98%, 99%, or more sequence identity to a reference sequence corresponding to residues 8 to 890 of an even-numbered SEQ ID NO. of SEQ ID NOs: 196-260, or to a reference sequence corresponding to an even-numbered SEQ ID NO. of SEQ ID NOs: 196-260, wherein the amino acid sequence comprises one or more substitutions relative to the reference sequence corresponding to residues 8 to 890 of SEQ ID NO: 156, or relative to the reference sequence corresponding to SEQ ID NO: 156.

[0313] In some embodiments, the recombinant polynucleotide comprises a polynucleotide sequence encoding an engineered RNA polymerase comprising an amino acid sequence comprising at least a substitution or substitution set at amino acid position(s) 207, 419, 207/336/340, 166/169, 207/670, 166/336/340, 207/419/670, 207/336/340/382/419/670, 207/382, 670, 336/670, 340/670, 382, 127/141/207/336/382/670, 207/336/382/419/670, 419/670, 166/168/207/336/340/419/670, 166/340, or 207/336/340/670, wherein the amino acid positions are relative to the reference sequence corresponding to residues 8 to 890 of SEQ ID NO: 156, or relative to the reference sequence corresponding to SEQ ID NO: 156.

[0314] In some embodiments, the recombinant polynucleotide comprises a polynucleotide sequence encoding an engineered RNA polymerase comprising an amino acid sequence comprising at least a substitution or substitution set at amino acid position(s) 38/437/779, 38/437, 38, 38/207/437/779, 517/779, 38/437/527/664, 38/207/379/437, 664/670/779, 38/779, 38/437/517, 437/779, 38/437/607, 38/379/779, or 517/670/779, wherein the amino acid positions are relative to the reference sequence corresponding to residues 8 to 890 of SEQ ID NO: 156, or relative to the reference sequence corresponding to SEQ ID NO: 156.

[0315] In some embodiments, the recombinant polynucleotide comprises a polynucleotide sequence encoding an engineered RNA polymerase comprising an amino acid sequence comprising at least a substitution set at amino acid position(s) 357/394/664 or 138/311/336/340/357/388/394/404/664, wherein the amino acid positions are relative to the reference sequence corresponding to residues 8 to 890 of SEQ ID NO: 156, or relative to the reference sequence corresponding to SEQ ID NO: 156.

[0316] In some embodiments, the recombinant polynucleotide comprises a polynucleotide sequence encoding an engineered RNA polymerase comprising an amino acid sequence having at least 70%, 75%, 80%, 81%, 82%, 83%, 84%, 85%, 86%, 87%, 88%, 89%, 90%, 91%, 92%, 93%, 94%, 95%, 96%, 97%, 98%, 99%, or more sequence identity to the reference sequence corresponding to residues 8 to 890 of SEQ ID NO: 234, or to the reference sequence corresponding to SEQ ID NO: 234, wherein the amino acid sequence comprises one or more substitutions relative to the reference sequence corresponding to residues 8 to 890 of SEQ ID NO: 234, or relative to the reference sequence corresponding to SEQ ID NO: 234.

[0317] In some embodiments, the recombinant polynucleotide comprises a polynucleotide sequence encoding an engineered RNA polymerase comprising an amino acid sequence having at least 70%, 75%, 80%, 81%, 82%, 83%, 84%, 85%, 86%, 87%, 88%, 89%, 90%, 91%, 92%, 93%, 94%, 95%, 96%, 97%, 98%, 99%, or more sequence identity to a reference sequence corresponding to residues 8 to 890 of an even-numbered SEQ ID NO. of SEQ ID NOs: 262-384, or to a reference sequence corresponding to an even-numbered SEQ ID NO. of SEQ ID NOs: 262-384, wherein the amino acid sequence comprises one or more substitutions relative to the reference sequence corresponding to residues 8 to 890 of SEQ ID NO: 234, or relative to the reference sequence corresponding to SEQ ID NO: 234.

[0318] In some embodiments, the recombinant polynucleotide comprises a polynucleotide sequence encoding an engineered RNA polymerase comprising an amino acid sequence comprising at least a substitution or substitution set at amino acid position(s) 720, 196, 609, 246, 185, 594, 212, 494, 375, 721, 72, 867, 160, 718, 187, 170/173, 615, 137/138, 854, 131, 38/185/187/437, 185/187, 437/609, 38/609, 38/185/187/437/609, 437/609/720, 185/187/609, 185/187/437, 437/721, 609/720, 185/187/246, or 185/187/437/609/720, wherein the amino acid positions are relative to the reference sequence corresponding to residues 8 to 890 of SEQ ID NO: 234, or relative to the reference sequence corresponding to SEQ ID NO: 234.

[0319] In some embodiments, the recombinant polynucleotide comprises a polynucleotide sequence encoding an engineered RNA polymerase comprising an amino acid sequence having at least 70%, 75%, 80%, 81%, 82%, 83%, 84%, 85%, 86%, 87%, 88%, 89%, 90%, 91%, 92%, 93%, 94%, 95%, 96%, 97%, 98%, 99%, or more sequence identity to the reference sequence corresponding to residues 8 to 890 of SEQ ID NO: 386, or to the reference sequence corresponding to SEQ ID NO: 386, wherein the amino acid sequence comprises one or more substitutions relative to the reference sequence corresponding to residues 8 to 890 of SEQ ID NO: 386, or relative to the reference sequence corresponding to SEQ ID NO: 386.

[0320] In some embodiments, the recombinant polynucleotide comprises a polynucleotide sequence encoding an engineered RNA polymerase comprising an amino acid sequence having at least 70%, 75%, 80%, 81%, 82%, 83%, 84%, 85%, 86%, 87%, 88%, 89%, 90%, 91%, 92%, 93%, 94%, 95%, 96%, 97%, 98%, 99%, or more sequence identity to a reference sequence corresponding to residues 8 to 890 of an even-numbered SEQ ID NO. of SEQ ID NOs: 388-460, or to a reference sequence corresponding to an even-numbered SEQ ID NO. of SEQ ID NOs: 388-460, wherein the amino acid sequence comprises one or more substitutions relative to the reference sequence corresponding to residues 8 to 890 of SEQ ID NO: 386, or relative to the reference sequence corresponding to SEQ ID NO: 386.

[0321] In some embodiments, the recombinant polynucleotide comprises a polynucleotide sequence encoding an engineered RNA polymerase comprising an amino acid sequence comprising at least a substitution or substitution set at amino acid position(s) 170/609, 38/185/187/609, 38/185/187, 38/170/173, 38/173/185/187/720, 170/185/187/609, 609, 170/185/187/609/721, 38/609, 38/170/246/609, 185/187/609/718, 38/185/187/609/718/720, 38/170/246/609/718, 720, 246/609, 38/185/187/246/720, 38/609/721, 38/721, 38/720/721, 38/170/609/718/720, 38/718, 38/185/187/609/718/721, 529/609, 38/609/718, 185/187/609/718/720, 185/187/609/718/721, 38/170/718/720/721, 170/185/187/718/720, 38/173/185/187/246/609/720, 609/718/720, 170/185/187/718/720/721, 38/170/173/246/609/718, 246/721, 38/718/720, or 38/609/718/720, wherein the amino acid positions are relative to the reference sequence corresponding to residues 8 to 890 of SEQ ID NO: 386, or relative to the reference sequence corresponding to SEQ ID NO: 386.

[0322] In some embodiments, the recombinant polynucleotide comprises a polynucleotide sequence encoding an engineered RNA polymerase comprising an amino acid sequence having at least 70%, 75%, 80%, 81%, 82%, 83%, 84%, 85%, 86%, 87%, 88%, 89%, 90%, 91%, 92%, 93%, 94%, 95%, 96%, 97%, 98%, 99%, or more sequence identity to the reference sequence corresponding to residues 8 to 890 of SEQ ID NO: 238, or to the reference sequence corresponding to SEQ ID NO: 238, wherein the amino acid sequence comprises one or more substitutions relative to the reference sequence corresponding to residues 8 to 890 of SEQ ID NO: 238, or relative to the reference sequence corresponding to SEQ ID NO: 238.

[0323] In some embodiments, the recombinant polynucleotide comprises a polynucleotide sequence encoding an engineered RNA polymerase comprising an amino acid sequence having at least 70%, 75%, 80%, 81%, 82%, 83%, 84%, 85%, 86%, 87%, 88%, 89%, 90%, 91%, 92%, 93%, 94%, 95%, 96%, 97%, 98%, 99%, or more sequence identity to the reference sequence corresponding to residues 8 to 890 of an even-numbered SEQ ID NO. of SEQ ID NOs: 462-584, or to the reference sequence corresponding to an even-numbered SEQ ID NO. of SEQ ID NOs: 462-584, wherein the amino acid sequence comprises one or more substitutions relative to the reference sequence corresponding to residues 8 to 890 of SEQ ID NO: 238, or relative to the reference sequence corresponding to SEQ ID NO: 238.

[0324] In some embodiments, the recombinant polynucleotide comprises a polynucleotide sequence encoding an engineered RNA polymerase comprising an amino acid sequence comprising at least a substitution or substitution set at amino acid position(s) 143, 105, 775/779, 135, 100, 246, 779/782, 749, 237, 162, 83, 218, 227, 115, 274, 81, 122, 61, 32, 139, 75, 239, 257, 240, 69/161, 253, 14, 221, 84, 133/150, 60, 275, 89, 15, 254, 625, 14/67, 21, 93, 250, 217, 19, 95, 759, 62, or 140, wherein the amino acid positions are relative to the reference sequence corresponding to residues 8 to 890 of SEQ ID NO: 238, or relative to the reference sequence corresponding to SEQ ID NO: 238.

[0325] In some embodiments, the recombinant polynucleotide comprises a polynucleotide sequence encoding an engineered RNA polymerase comprising an amino acid sequence having at least 70%, 75%, 80%, 81%, 82%, 83%, 84%, 85%, 86%, 87%, 88%, 89%, 90%, 91%, 92%, 93%, 94%, 95%, 96%, 97%, 98%, 99%, or more sequence identity to the reference sequence corresponding to residues 8 to 890 of SEQ ID NO: 394, or to the reference sequence corresponding to SEQ ID NO: 394, wherein the amino acid sequence comprises one or more substitutions relative to the reference sequence corresponding to residues 8 to 890 of SEQ ID NO: 394, or relative to the reference sequence corresponding to SEQ ID NO: 394.

[0326] In some embodiments, the recombinant polynucleotide comprises a polynucleotide sequence encoding the engineered RNA polymerase comprising an amino acid sequence having at least 70%, 75%, 80%, 81%, 82%, 83%, 84%, 85%, 86%, 87%, 88%, 89%, 90%, 91%, 92%, 93%, 94%, 95%, 96%, 97%, 98%, 99%, or more sequence identity to a reference sequence corresponding to residues 8 to 890 of an even-numbered SEQ ID NO. of SEQ ID NOs: 586-602, or to a reference sequence corresponding to an even-numbered SEQ ID NO. of SEQ ID NOs: 586-602, wherein the amino acid sequence comprises one or more substitutions relative to the reference sequence corresponding to residues 8 to 890 of SEQ ID NO: 394, or relative to the reference sequence corresponding to SEQ ID NO: 394.

[0327] In some embodiments, the recombinant polynucleotide comprises a polynucleotide sequence encoding an engineered RNA polymerase comprising an amino acid sequence comprising at least a substitution or substitution set at amino acid position(s) 609/779, 246/609, 246, 609/775/779, 105, 143/609/775, 105/135/609/775, or 111/609, 609, wherein the amino acid positions are relative to the reference sequence corresponding to residues 8 to 890 of SEQ ID NO: 394, or relative to the reference sequence corresponding to SEQ ID NO: 394.

[0328] In some embodiments, the recombinant polynucleotide comprises a polynucleotide sequence encoding an engineered RNA polymerase comprising an amino acid sequence having at least 70%, 75%, 80%, 81%, 82%, 83%, 84%, 85%, 86%, 87%, 88%, 89%, 90%, 91%, 92%, 93%, 94%, 95%, 96%, 97%, 98%, 99%, or more sequence identity to the reference sequence corresponding to residues 8 to 890 of SEQ ID NO: 588, or to the reference sequence corresponding to SEQ ID NO: 588, wherein the amino acid sequence comprises one or more substitutions relative to the reference sequence corresponding to residues 8 to 890 of SEQ ID NO: 588, or relative to the reference sequence corresponding to SEQ ID NO: 588.

[0329] In some embodiments, the recombinant polynucleotide comprises a polynucleotide sequence encoding an engineered RNA polymerase comprising an amino acid sequence having at least 70%, 75%, 80%, 81%, 82%, 83%, 84%, 85%, 86%, 87%, 88%, 89%, 90%, 91%, 92%, 93%, 94%, 95%, 96%, 97%, 98%, 99%, or more sequence identity to a reference sequence corresponding to residues 8 to 890 of an even-numbered SEQ ID NO. of SEQ ID NOs: 604-680, or to a reference sequence corresponding to an even-numbered SEQ ID NO. of SEQ ID NOs: 604-680, wherein the amino acid sequence comprises one or more substitutions relative to the reference sequence corresponding to residues 8 to 890 of SEQ ID NO: 588, or relative to the reference sequence corresponding to SEQ ID NO: 588.

[0330] In some embodiments, the recombinant polynucleotide comprises a polynucleotide sequence encoding an engineered RNA polymerase comprising an amino acid sequence comprising at least a substitution or substitution set at amino acid position(s) 32, 531/533, 115, 83, 32/60/61, 55, 589, 357, 617, 172, 598, 56/193, 56, 536, 52, 17, 261, 78, 629, 63, 82, 207, 666, 150, 45, 135, 13, 33, or 245, wherein the amino acid positions are relative to the reference sequence corresponding to residues 8 to 890 of SEQ ID NO: 588, or relative to the reference sequence corresponding to SEQ ID NO: 588.

[0331] In some embodiments, the recombinant polynucleotide comprises a polynucleotide sequence encoding the engineered RNA polymerase comprising an amino acid sequence having at least 70%, 75%, 80%, 81%, 82%, 83%, 84%, 85%, 86%, 87%, 88%, 89%, 90%, 91%, 92%, 93%, 94%, 95%, 96%, 97%, 98%, 99%, or more sequence identity to the reference sequence corresponding to residues 8 to 890 of SEQ ID NO: 604, or to the reference sequence corresponding to SEQ ID NO: 604, wherein the amino acid sequence comprises one or more substitutions relative to the reference sequence corresponding to residues 8 to 890 of SEQ ID NO: 604, or relative to the reference sequence corresponding to SEQ ID NO: 604.

[0332] In some embodiments, the recombinant polynucleotide comprises a polynucleotide sequence encoding an engineered RNA polymerase comprising an amino acid sequence having at least 70%, 75%, 80%, 81%, 82%, 83%, 84%, 85%, 86%, 87%, 88%, 89%, 90%, 91%, 92%, 93%, 94%, 95%, 96%, 97%, 98%, 99%, or more sequence identity to a reference sequence corresponding to residues 8 to 890 of an even-numbered SEQ ID NO. of SEQ ID NOs: 682-704, or to a reference sequence corresponding to an even-numbered SEQ ID NO. of SEQ ID NOs: 682-704, wherein the amino acid sequence comprises one or more substitutions relative to the reference sequence corresponding to residues 8 to 890 of SEQ ID NO: 604, or relative to the reference sequence corresponding to SEQ ID NO: 604.

[0333] In some embodiments, the recombinant polynucleotide comprises a polynucleotide sequence encoding an engineered RNA polymerase comprising an amino acid sequence comprising at least a substitution or substitution set at amino acid position(s) 207/245/629, 17/56/150/598, 56/629, 536, 185, 56/150, 17/56/150/207/245/598/617/629, 56/150/536/598, 56/536, 185/666, 150, or 143/150/246/782, wherein the amino acid positions are relative to the reference sequence corresponding to residues 8 to 890 of SEQ ID NO: 604, or relative to the reference sequence corresponding to SEQ ID NO: 604.

[0334] In some embodiments, the recombinant polynucleotide comprises a polynucleotide sequence encoding an engineered RNA polymerase comprising an amino acid sequence having at least 70%, 75%, 80%, 81%, 82%, 83%, 84%, 85%, 86%, 87%, 88%, 89%, 90%, 91%, 92%, 93%, 94%, 95%, 96%, 97%, 98%, 99%, or more sequence identity to the reference sequence corresponding to residues 8 to 890 of SEQ ID NO: 686, or to the reference sequence corresponding to SEQ ID NO: 686, wherein the amino acid sequence comprises one or more substitutions relative to the reference sequence corresponding to residues 8 to 890 of SEQ ID NO: 686, or relative to the reference sequence corresponding to SEQ ID NO: 686.

[0335] In some embodiments, the recombinant polynucleotide comprises a polynucleotide sequence encoding an engineered RNA polymerase comprising an amino acid sequence having at least 70%, 75%, 80%, 81%, 82%, 83%, 84%, 85%, 86%, 87%, 88%, 89%, 90%, 91%, 92%, 93%, 94%, 95%, 96%, 97%, 98%, 99%, or more sequence identity to a reference sequence corresponding to residues 8 to 890 of an even-numbered SEQ ID NO. of SEQ ID NOs: 706-720, or to a reference sequence corresponding to an even-numbered SEQ ID NO. of SEQ ID NOs: 706-720, wherein the amino acid sequence comprises one or more substitutions relative to the reference sequence corresponding to residues 8 to 890 of SEQ ID NO: 686, or relative to the reference sequence corresponding to SEQ ID NO: 686.

[0336] In some embodiments, the recombinant polynucleotide comprises a polynucleotide sequence encoding an engineered RNA polymerase comprising an amino acid sequence comprising at least a substitution or substitution set at amino acid position(s) 143, 246/424/648/782, 246/659/782, 56/150/629/660/782, 721/782, 782, 196/659/782, or 720/721/782, wherein the amino acid positions are relative to the reference sequence corresponding to residues 8 to 890 of SEQ ID NO: 686, or relative to the reference sequence corresponding to SEQ ID NO: 686.

[0337] In some embodiments, the recombinant polynucleotide comprises a polynucleotide sequence encoding an engineered RNA polymerase comprising an amino acid sequence having at least 70%, 75%, 80%, 81%, 82%, 83%, 84%, 85%, 86%, 87%, 88%, 89%, 90%, 91%, 92%, 93%, 94%, 95%, 96%, 97%, 98%, 99%, or more sequence identity to the reference sequence corresponding to residues 8 to 890 of SEQ ID NO: 692, or to the reference sequence corresponding to SEQ ID NO: 692, wherein the amino acid sequence comprises one or more substitutions relative to the reference sequence corresponding to residues 8 to 890 of SEQ ID NO: 692, or relative to the reference sequence corresponding to SEQ ID NO: 692.

[0338] In some embodiments, the recombinant polynucleotide comprises a polynucleotide sequence encoding an engineered RNA polymerase comprising an amino acid sequence having at least 70%, 75%, 80%, 81%, 82%, 83%, 84%, 85%, 86%, 87%, 88%, 89%, 90%, 91%, 92%, 93%, 94%, 95%, 96%, 97%, 98%, 99%, or more sequence identity to a reference sequence corresponding to residues 8 to 890 of an even-numbered SEQ ID NO. of SEQ ID NOs: 722-730, or to a reference sequence corresponding to an even-numbered SEQ ID NO. of SEQ ID NOs: 722-730, wherein the amino acid sequence comprises one or more substitutions relative to the reference sequence corresponding to residues 8 to 890 of SEQ ID NO: 692, or relative to the reference sequence corresponding to SEQ ID NO: 692.

[0339] In some embodiments, the recombinant polynucleotide comprises a polynucleotide sequence encoding an engineered RNA polymerase comprising an amino acid sequence comprising at least a substitution or substitution set at amino acid position(s) 143/659/782, 166/171/246/311, 143/721, 782, or 143/171/659/782, wherein the amino acid positions are relative to the reference sequence corresponding to residues 8 to 890 of SEQ ID NO: 692, or relative to the reference sequence corresponding to SEQ ID NO: 692.

[0340] In some embodiments, the recombinant polynucleotide comprises a polynucleotide sequence encoding an engineered RNA polymerase comprising an amino acid sequence having at least 70%, 75%, 80%, 81%, 82%, 83%, 84%, 85%, 86%, 87%, 88%, 89%, 90%, 91%, 92%, 93%, 94%, 95%, 96%, 97%, 98%, 99%, or more sequence identity to the reference sequence corresponding to residues 8 to 890 of SEQ ID NO: 712, or to the reference sequence corresponding to SEQ ID NO: 712, wherein the amino acid sequence comprises one or more substitutions relative to the reference sequence corresponding to residues 8 to 890 of SEQ ID NO: 712, or relative to the reference sequence corresponding to SEQ ID NO: 712.

[0341] In some embodiments, the recombinant polynucleotide comprises a polynucleotide sequence encoding an engineered RNA polymerase comprising an amino acid sequence having at least 70%, 75%, 80%, 81%, 82%, 83%, 84%, 85%, 86%, 87%, 88%, 89%, 90%, 91%, 92%, 93%, 94%, 95%, 96%, 97%, 98%, 99%, or more sequence identity to a reference sequence corresponding to residues 8 to 890 of an even-numbered SEQ ID NO. of SEQ ID NOs: 732-802, or to a reference sequence corresponding to an even-numbered SEQ ID NO. of SEQ ID NOs: 732-802, wherein the amino acid sequence comprises one or more substitutions relative to the reference sequence corresponding to residues 8 to 890 of SEQ ID NO: 712, or relative to the reference sequence corresponding to SEQ ID NO: 712.

[0342] In some embodiments, the recombinant polynucleotide comprises a polynucleotide sequence encoding an engineered RNA polymerase comprising an amino acid sequence comprising at least a substitution or substitution set at amino acid position(s) 367, 382, 670, 672, 357, 388, 693, 397, 375, 137/382/782, 655, 137/382/392, 391, 137/655/721/763, 696, 663, 137/382, 137/382/392/650/655/782, 137/382/629/660/672, 616, 690, 179, 137, 357/382/670, 388/670/672, 357/375, 357/672, 629, or 655/670, wherein the amino acid positions are relative to the reference sequence corresponding to residues 8 to 890 of SEQ ID NO: 712, or relative to the reference sequence corresponding to residues 8 to 890 of SEQ ID NO: 712, or relative to the reference sequence corresponding to SEQ ID NO: 712.

[0343] In some embodiments, the recombinant polynucleotide comprises a polynucleotide sequence encoding an engineered RNA polymerase comprising an amino acid sequence having at least 70%, 75%, 80%, 81%, 82%, 83%, 84%, 85%, 86%, 87%, 88%, 89%, 90%, 91%, 92%, 93%, 94%, 95%, 96%, 97%, 98%, 99%, or more sequence identity to the reference sequence corresponding to residues 8 to 890 of SEQ ID NO: 800, or to the reference sequence corresponding to SEQ ID NO: 800, wherein the amino acid sequence comprises one or more substitutions relative to the reference sequence corresponding to residues 8 to 890 of SEQ ID NO: 800, or relative to the reference sequence corresponding to SEQ ID NO: 800.

[0344] In some embodiments, the recombinant polynucleotide comprises a polynucleotide sequence encoding an engineered RNA polymerase comprising an amino acid sequence having at least 70%, 75%, 80%, 81%, 82%, 83%, 84%, 85%, 86%, 87%, 88%, 89%, 90%, 91%, 92%, 93%, 94%, 95%, 96%, 97%, 98%, 99%, or more sequence identity to a reference sequence corresponding to residues 8 to 890 of an even-numbered SEQ ID NO. of SEQ ID NOs: 804-828, or to a reference sequence corresponding to an even-numbered SEQ ID NO. of SEQ ID NOs: 804-828, wherein the amino acid sequence comprises one or more substitutions relative to the reference sequence corresponding to residues 8 to 890 of SEQ ID NO: 800, or relative to the reference sequence corresponding to SEQ ID NO: 800.

[0345] In some embodiments, the recombinant polynucleotide comprises a polynucleotide sequence encoding an engineered RNA polymerase comprising an amino acid sequence comprising at least a substitution or substitution set at amino acid position(s) 137, 56/311/382, 56/137/143/721, 137/392, 56/137/392, 56/137/143/404/720, 56/143/246, 56/392, 392/404, 392, 56/137, or 56/196/392, wherein the amino acid positions are relative to the reference sequence corresponding to residues 8 to 890 of SEQ ID NO: 800, or relative to the reference sequence corresponding to SEQ ID NO: 800.

[0346] In some embodiments, the recombinant polynucleotide comprises a polynucleotide sequence encoding an engineered RNA polymerase comprising an amino acid sequence comprising a substitution at an amino acid position set forth in Tables 5.1, 6.1, 7.1, 8.1, 9.1, 10.1, 11.1, 12.1, 13.1, 14.1, 15.1, 16.1, 17.1, 18.1, 19.1, 23.1, and 24.1, wherein the amino acid positions are relative to the reference sequence corresponding to residues 8 to 890 of SEQ ID NO: 2, 4, 32, 44, 156, 234, 238, 386, 394, 588, 604, 686, 692, 712, or 800, or relative to the reference sequence corresponding to residues 8 to 890 of SEQ ID NO: 2, 4, 32, 44, 156, 234, 238, 386, 394, 588, 604, 686, 692, 712, or 800.

[0347] In some embodiments, the recombinant polynucleotide comprises a polynucleotide sequence encoding an engineered RNA polymerase comprising an amino acid sequence comprising at least one substitution set forth in Tables 5.1, 6.1, 7.1, 8.1, 9.1, 10.1, 11.1, 12.1, 13.1, 14.1, 15.1, 16.1, 17.1, 18.1, 19.1, 23.1, and 24.1, wherein the amino acid positions are relative to the reference sequence corresponding to residues 8 to 890 of SEQ ID NO: 2, 4, 32, 44, 156, 234, 238, 386, 394, 588, 604, 686, 692, 712, or 800, or relative to the reference sequence corresponding to residues 8 to 890 of SEQ ID NO: 2, 4, 32, 44, 156, 234, 238, 386, 394, 588, 604, 686, 692, 712, or 800.

[0348] In some embodiments, the recombinant polynucleotide comprises a polynucleotide sequence encoding an engineered RNA polymerase comprising an amino acid sequence comprising at least a substitution or substitution set at the amino acid position(s) of an engineered RNA polymerase set forth in Tables 5.1, 6.1, 7.1, 8.1, 9.1, 10.1, 11.1, 12.1, 13.1, 14.1, 15.1, 16.1, 17.1, 18.1, 19.1, 23.1, and 24.1, wherein the amino acid positions are relative to the reference sequence corresponding to residues 8 to 890 of SEQ ID NO: 2, 4, 32, 44, 156, 234, 238, 386, 394, 588, 604, 686, 692, 712, or 800, or relative to the reference sequence corresponding to residues 8 to 890 of SEQ ID NO: 2, 4, 32, 44, 156, 234, 238, 386, 394, 588, 604, 686, 692, 712, or 800.

[0349] In some embodiments, the recombinant polynucleotide comprises a polynucleotide sequence encoding an engineered RNA polymerase comprising an amino acid sequence comprising at least a substitution or substitution set of an engineered RNA polymerase variant set forth in Tables 5.1, 6.1, 7.1, 8.1, 9.1, 10.1, 11.1, 12.1, 13.1, 14.1, 15.1, 16.1, 17.1, 18.1, 19.1, 23.1, and 24.1, wherein the amino acid positions are relative to the reference sequence corresponding to residues 8 to 890 of SEQ ID NO: 2, 4, 32, 44, 156, 234, 238, 386, 394, 588, 604, 686, 692, 712, or 800, or relative to the reference sequence corresponding to residues 8 to 890 of SEQ ID NO: 2, 4, 32, 44, 156, 234, 238, 386, 394, 588, 604, 686, 692, 712, or 800.

[0350] In some embodiments, the recombinant polynucleotide comprises a polynucleotide sequence encoding an engineered RNA polymerase comprising an amino acid sequence having at least 70%, 75%, 80%, 81%, 82%, 83%, 84%, 85%, 86%, 87%, 88%, 89%, 90%, 91%, 92%, 93%, 94%, 95%, 96%, 97%, 98%, 99%, or more sequence identity to a reference sequence comprising at least a substitution or substitution set as set forth in Tables 5.1, 6.1, 7.1, 8.1, 9.1, 10.1, 11.1, 12.1, 13.1, 14.1, 15.1, 16.1, 17.1, 18.1, 19.1, 23.1, and 24.1, wherein the amino acid positions are relative to the reference sequence corresponding to residues 8 to 890 of SEQ ID NO: 2, 4, 32, 44, 156, 234, 238, 386, 394, 588, 604, 686, 692, 712, or 800, or relative to the reference sequence corresponding to SEQ ID NO: 2, 4, 32, 44, 156, 234, 238, 386, 394, 588, 604, 686, 692, 712, or 800.

[0351] In some embodiments, the recombinant polynucleotide comprises a polynucleotide sequence encoding the engineered RNA polymerase comprising an amino acid sequence comprising residues 8 to 890 of an even numbered SEQ ID NO. of SEQ ID NOs: 4-828, or comprising an even numbered SEQ ID NO. of SEQ ID NOs: 4-828.

[0352] In some embodiments, the recombinant polynucleotide comprises a polynucleotide sequence encoding the engineered RNA polymerase comprising an amino acid sequence comprising residues 8 to 890 of SEQ ID NO: 4, 6, 8, 10, 12, 14, 16, 18, 20, 22, 24, 26, 28, 30, 32, 34, 36, 38, 40, 42, 44, 46, 48, 50, 52, 54, 56, 58, 60, 62, 64, 66, 68, 70, 72, 74, 76, 78, 80, 82, 84, 86, 88, 90, 92, 94, 96, 98, 100, 102, 104, 106, 108, 110, 112, 114, 116, 118, 120, 122, 124, 126, 128, 130, 132, 134, 136, 138, 140, 142, 144, 146, 148, 150, 152, 154, 156, 158, 160, 162, 164, 166, 168, 170, 172, 174, 176, 178, 180, 182, 184, 186, 188, 190, 192, 194, 196, 198, 200, 202, 204, 206, 208, 210, 212, 214, 216, 218, 220, 222, 224, 226, 228, 230, 232, 234, 236, 238, 240, 242, 244, 246, 248, 250, 252, 254, 256, 258, 260, 262, 264, 266, 268, 270, 272, 274, 276, 278, 280, 282, 284, 286, 288, 290, 292, 294, 296, 298, 300, 302, 304, 306, 308, 310, 312, 314, 316, 318, 320, 322, 324, 326, 328, 330, 332, 334, 336, 338, 340, 342, 344, 346, 348, 350, 352, 354, 356, 358, 360, 362, 364, 366, 368, 370, 372, 374, 376, 378, 380, 382, 384, 386, 388, 390, 392, 394, 396, 398, 400, 402, 404, 406, 408, 410, 412, 414, 416, 418, 420, 422, 424, 426, 428, 430, 432, 434, 436, 438, 440, 442, 444, 446, 448, 450, 452, 454, 456, 458, 460, 462, 464, 466, 468, 470, 472, 474, 476, 478, 480, 482, 484, 486, 488, 490, 492, 494, 496, 498, 400, 402, 404, 406, 408, 410, 412, 414, 416, 418, 420, 422, 424, 426, 428, 430, 432, 434, 436, 438, 440, 442, 444, 446, 448, 450, 452, 454, 456, 458, 460, 462, 464, 466, 468, 470, 472, 474, 476, 478, 480, 482, 484, 486, 488, 490, 492, 494, 496, 498, 500, 502, 504, 506, 508, 510, 512, 514, 516, 518, 520, 522, 524, 526, 528, 530, 532, 534, 536, 538, 540, 542, 544, 546, 548, 550, 552, 554, 556, 558, 560, 562, 564, 566, 568, 570, 572, 574, 576, 578, 580, 582, 584, 586, 588, 590, 592, 594, 596, 598, 600, 602, 604, 606, 608, 610, 612, 614, 616, 618, 620, 622, 624, 626, 628, 630, 632, 634, 636, 638, 640, 642, 644, 646, 648, 650, 652, 654, 656, 658, 660, 662, 664, 666, 668, 670, 672, 674, 676, 678, 680, 682, 684, 686, 688, 690, 692, 694, 696, 698, 700, 702, 704, 706, 708, 710, 712, 714, 716, 718, 720, 722, 724, 276, 728, 730, 732, 734, 736, 738, 740, 742, 744, 746, 748, 750, 752, 754, 756, 758, 760, 762, 764, 766, 768, 770, 772, 774, 776, 778, 780, 782, 784, 786, 788, 790, 792, 794, 796, 798, 800, 802, 804, 806, 808, 810, 812, 814, 816, 818, 820, 822, 824, 826, or 828.

[0353] In some embodiments, the recombinant polynucleotide comprises a polynucleotide sequence encoding the engineered RNA polymerase comprising an amino acid sequence comprising SEQ ID NO: 4, 6, 8, 10, 12, 14, 16, 18, 20, 22, 24, 26, 28, 30, 32, 34, 36, 38, 40, 42, 44, 46, 48, 50, 52, 54, 56, 58, 60, 62, 64, 66, 68, 70, 72, 74, 76, 78, 80, 82, 84, 86, 88, 90, 92, 94, 96, 98, 100, 102, 104, 106, 108, 110, 112, 114, 116, 118, 120, 122, 124, 126, 128, 130, 132, 134, 136, 138, 140, 142, 144, 146, 148, 150, 152, 154, 156, 158, 160, 162, 164, 166, 168, 170, 172, 174, 176, 178, 180, 182, 184, 186, 188, 190, 192, 194, 196, 198, 200, 202, 204, 206, 208, 210, 212, 214, 216, 218, 220, 222, 224, 226, 228, 230, 232, 234, 236, 238, 240, 242, 244, 246, 248, 250, 252, 254, 256, 258, 260, 262, 264, 266, 268, 270, 272, 274, 276, 278, 280, 282, 284, 286, 288, 290, 292, 294, 296, 298, 300, 302, 304, 306, 308, 310, 312, 314, 316, 318, 320, 322, 324, 326, 328, 330, 332, 334, 336, 338, 340, 342, 344, 346, 348, 350, 352, 354, 356, 358, 360, 362, 364, 366, 368, 370, 372, 374, 376, 378, 380, 382, 384, 386, 388, 390, 392, 394, 396, 398, 400, 402, 404, 406, 408, 410, 412, 414, 416, 418, 420, 422, 424, 426, 428, 430, 432, 434, 436, 438, 440, 442, 444, 446, 448, 450, 452, 454, 456, 458, 460, 462, 464, 466, 468, 470, 472, 474, 476, 478, 480, 482, 484, 486, 488, 490, 492, 494, 496, 498, 400, 402, 404, 406, 408, 410, 412, 414, 416, 418, 420, 422, 424, 426, 428, 430, 432, 434, 436, 438, 440, 442, 444, 446, 448, 450, 452, 454, 456, 458, 460, 462, 464, 466, 468, 470, 472, 474, 476, 478, 480, 482, 484, 486, 488, 490, 492, 494, 496, 498, 500, 502, 504, 506, 508, 510, 512, 514, 516, 518, 520, 522, 524, 526, 528, 530, 532, 534, 536, 538, 540, 542, 544, 546, 548, 550, 552, 554, 556, 558, 560, 562, 564, 566, 568, 570, 572, 574, 576, 578, 580, 582, 584, 586, 588, 590, 592, 594, 596, 598, 600, 602, 604, 606, 608, 610, 612, 614, 616, 618, 620, 622, 624, 626, 628, 630, 632, 634, 636, 638, 640, 642, 644, 646, 648, 650, 652, 654, 656, 658, 660, 662, 664, 666, 668, 670, 672, 674, 676, 678, 680, 682, 684, 686, 688, 690, 692, 694, 696, 698, 700, 702, 704, 706, 708, 710, 712, 714, 716, 718, 720, 722, 724, 276, 728, 730, 732, 734, 736, 738, 740, 742, 744, 746, 748, 750, 752, 754, 756, 758, 760, 762, 764, 766, 768, 770, 772, 774, 776, 778, 780, 782, 784, 786, 788, 790, 792, 794, 796, 798, 800, 802, 804, 806, 808, 810, 812, 814, 816, 818, 820, 822, 824, 826, or 828.

[0354] In some embodiments, the recombinant polynucleotide comprises a polynucleotide sequence having at least 70%, 75%, 75%, 80%, 81%, 82%, 83%, 84%, 85%, 90%, 91%, 92%, 93%, 94%, 95%, 96%, 97%, 98%, 99%, or more sequence identity to a reference polynucleotide sequence corresponding to nucleotide residues 21 to 2670 of an odd-numbered SEQ ID NO. of SEQ ID NOs: 3-827, or corresponding to an odd-numbered SEQ ID NO. of SEQ ID NOs: 3-827, wherein the recombinant polynucleotide encodes an RNA polymerase.

[0355] In some embodiments, the recombinant polynucleotide comprises a polynucleotide sequence having at least 70%, 75%, 75%, 80%, 81%, 82%, 83%, 84%, 85%, 90%, 91%, 92%, 93%, 94%, 95%, 96%, 97%, 98%, 99%, or more sequence identity to a reference polynucleotide sequence corresponding to nucleotide residues 21 to 2670 of SEQ ID NO: 3, 31, 43, 155, 233, 237, 381, 393, 587, 603, 685, 691, 711, or 799, or corresponding to SEQ ID NO: 3, 31, 43, 155, 233, 237, 381, 393, 587, 603, 685, 691, 711, or 799, wherein the recombinant polynucleotide encodes an RNA polymerase.

[0356] In some embodiments, the recombinant polynucleotide comprises a polynucleotide sequence having at least 70%, 75%, 80%, 81%, 82%, 83%, 84%, 85%, 86%, 87%, 88%, 89%, 90%, 91%, 92%, 93%, 94%, 95%, 96%, 97%, 98%, 99% or more sequence identity to a reference polynucleotide sequence corresponding to nucleotide residues 21 to 2670 of SEQ ID NO: 3, 5, 7, 9, 11, 13, 15, 17, 19, 21, 23, 25, 27, 29, 31, 33, 35, 37, 39, 41, 43, 45, 47, 49, 51, 53, 55, 57, 59, 61, 63, 65, 67, 69, 71, 73, 75, 77, 79, 81, 83, 85, 87, 89, 91, 93, 95, 97, 99, 101, 103, 105, 107, 109, 111, 113, 115, 117, 119, 121, 123, 125, 127, 129, 131, 133, 135, 137, 139, 141, 143, 145, 147, 149, 151, 153, 155, 157, 159, 161, 163, 165, 167, 169, 171, 173, 175, 177, 179, 181, 183, 185, 187, 189, 191, 193, 195, 197, 199, 201, 203, 205, 207, 209, 211, 213, 215, 217, 219, 221, 223, 225, 227, 229, 231, 233, 235, 237, 239, 241, 243, 245, 247, 249, 251, 253, 255, 257, 259, 261, 263, 265, 267, 269, 271, 273, 275, 277, 279, 281, 283, 285, 287, 289, 291, 293, 295, 297, 299, 301, 303, 305, 307, 309, 311, 313, 315, 317, 319, 321, 323, 325, 327, 329, 331, 333, 335, 337, 339, 341, 343, 345, 347, 349, 351, 353, 355, 357, 359, 361, 363, 365, 367, 369, 371, 373, 375, 377, 379, 381, 383, 385, 387, 389, 391, 393, 395, 397, 399, 401, 403, 405, 407, 409, 411, 413, 415, 417, 419, 421, 423, 425, 427, 429, 431, 433, 435, 437, 439, 441, 443, 445, 447, 449, 451, 453, 455, 457, 459, 461, 463, 465, 467, 469, 471, 473, 475, 477, 479, 481, 483, 485, 487, 489, 491, 493, 495, 497, 399, 401, 403, 405, 407, 409, 411, 413, 415, 417, 419, 421, 423, 425, 427, 429, 431, 433, 435, 437, 439, 441, 443, 445, 447, 449, 451, 453, 455, 457, 459, 461, 463, 465, 467, 469, 471, 473, 475, 477, 479, 481, 483, 485, 487, 489, 491, 493, 495, 497, 499, 501, 503, 505, 507, 509, 511, 513, 515, 517, 519, 521, 523, 525, 527, 529, 531, 533, 535, 537, 539, 541, 543, 545, 547, 549, 551, 553, 555, 557, 559, 561, 563, 565, 567, 569, 571, 573, 575, 577, 579, 581, 583, 585, 587, 589, 591, 593, 595, 597, 599, 601, 603, 605, 607, 609, 611, 613, 615, 617, 619, 621, 623, 625, 627, 629, 631, 633, 635, 637, 639, 641, 643, 645, 647, 649, 651, 653, 655, 657, 659, 661, 663, 665, 667, 669, 671, 673, 675, 677, 679, 681, 683, 685, 687, 689, 691, 693, 695, 697, 699, 701, 703, 705, 707, 709, 711, 713, 715, 717, 719, 721, 723, 275, 727, 729, 731, 733, 735, 737, 739, 741, 743, 745, 747, 749, 751, 753, 755, 757, 759, 761, 763, 765, 767, 769, 771, 773, 775, 777, 779, 781, 783, 785, 787, 789, 791, 793, 795, 797, 799, 801, 803, 805, 807, 809, 811, 813, 815, 817, 819, 821, 823, 825, or 827, wherein the recombinant polynucleotide encodes an RNA polymerase.

[0357] In some embodiments, the recombinant polynucleotide comprises a polynucleotide sequence having at least 70%, 75%, 80%, 81%, 82%, 83%, 84%, 85%, 86%, 87%, 88%, 89%, 90%, 91%, 92%, 93%, 94%, 95%, 96%, 97%, 98%, 99% or more sequence identity to the reference polynucleotide sequence corresponding to SEQ ID NO: 3, 5, 7, 9, 11, 13, 15, 17, 19, 21, 23, 25, 27, 29, 31, 33, 35, 37, 39, 41, 43, 45, 47, 49, 51, 53, 55, 57, 59, 61, 63, 65, 67, 69, 71, 73, 75, 77, 79, 81, 83, 85, 87, 89, 91, 93, 95, 97, 99, 101, 103, 105, 107, 109, 111, 113, 115, 117, 119, 121, 123, 125, 127, 129, 131, 133, 135, 137, 139, 141, 143, 145, 147, 149, 151, 153, 155, 157, 159, 161, 163, 165, 167, 169, 171, 173, 175, 177, 179, 181, 183, 185, 187, 189, 191, 193, 195, 197, 199, 201, 203, 205, 207, 209, 211, 213, 215, 217, 219, 221, 223, 225, 227, 229, 231, 233, 235, 237, 239, 241, 243, 245, 247, 249, 251, 253, 255, 257, 259, 261, 263, 265, 267, 269, 271, 273, 275, 277, 279, 281, 283, 285, 287, 289, 291, 293, 295, 297, 299, 301, 303, 305, 307, 309, 311, 313, 315, 317, 319, 321, 323, 325, 327, 329, 331, 333, 335, 337, 339, 341, 343, 345, 347, 349, 351, 353, 355, 357, 359, 361, 363, 365, 367, 369, 371, 373, 375, 377, 379, 381, 383, 385, 387, 389, 391, 393, 395, 397, 399, 401, 403, 405, 407, 409, 411, 413, 415, 417, 419, 421, 423, 425, 427, 429, 431, 433, 435, 437, 439, 441, 443, 445, 447, 449, 451, 453, 455, 457, 459, 461, 463, 465, 467, 469, 471, 473, 475, 477, 479, 481, 483, 485, 487, 489, 491, 493, 495, 497, 399, 401, 403, 405, 407, 409, 411, 413, 415, 417, 419, 421, 423, 425, 427, 429, 431, 433, 435, 437, 439, 441, 443, 445, 447, 449, 451, 453, 455, 457, 459, 461, 463, 465, 467, 469, 471, 473, 475, 477, 479, 481, 483, 485, 487, 489, 491, 493, 495, 497, 499, 501, 503, 505, 507, 509, 511, 513, 515, 517, 519, 521, 523, 525, 527, 529, 531, 533, 535, 537, 539, 541, 543, 545, 547, 549, 551, 553, 555, 557, 559, 561, 563, 565, 567, 569, 571, 573, 575, 577, 579, 581, 583, 585, 587, 589, 591, 593, 595, 597, 599, 601, 603, 605, 607, 609, 611, 613, 615, 617, 619, 621, 623, 625, 627, 629, 631, 633, 635, 637, 639, 641, 643, 645, 647, 649, 651, 653, 655, 657, 659, 661, 663, 665, 667, 669, 671, 673, 675, 677, 679, 681, 683, 685, 687, 689, 691, 693, 695, 697, 699, 701, 703, 705, 707, 709, 711, 713, 715, 717, 719, 721, 723, 275, 727, 729, 731, 733, 735, 737, 739, 741, 743, 745, 747, 749, 751, 753, 755, 757, 759, 761, 763, 765, 767, 769, 771, 773, 775, 777, 779, 781, 783, 785, 787, 789, 791, 793, 795, 797, 799, 801, 803, 805, 807, 809, 811, 813, 815, 817, 819, 821, 823, 825, or 827, wherein the recombinant polynucleotide encodes an RNA polymerase.

[0358] In some embodiments, the recombinant polynucleotide comprises a polynucleotide sequence comprising nucleotide residues 21 to 2670 of SEQ ID NO: 3, 5, 7, 9, 11, 13, 15, 17, 19, 21, 23, 25, 27, 29, 31, 33, 35, 37, 39, 41, 43, 45, 47, 49, 51, 53, 55, 57, 59, 61, 63, 65, 67, 69, 71, 73, 75, 77, 79, 81, 83, 85, 87, 89, 91, 93, 95, 97, 99, 101, 103, 105, 107, 109, 111, 113, 115, 117, 119, 121, 123, 125, 127, 129, 131, 133, 135, 137, 139, 141, 143, 145, 147, 149, 151, 153, 155, 157, 159, 161, 163, 165, 167, 169, 171, 173, 175, 177, 179, 181, 183, 185, 187, 189, 191, 193, 195, 197, 199, 201, 203, 205, 207, 209, 211, 213, 215, 217, 219, 221, 223, 225, 227, 229, 231, 233, 235, 237, 239, 241, 243, 245, 247, 249, 251, 253, 255, 257, 259, 261, 263, 265, 267, 269, 271, 273, 275, 277, 279, 281, 283, 285, 287, 289, 291, 293, 295, 297, 299, 301, 303, 305, 307, 309, 311, 313, 315, 317, 319, 321, 323, 325, 327, 329, 331, 333, 335, 337, 339, 341, 343, 345, 347, 349, 351, 353, 355, 357, 359, 361, 363, 365, 367, 369, 371, 373, 375, 377, 379, 381, 383, 385, 387, 389, 391, 393, 395, 397, 399, 401, 403, 405, 407, 409, 411, 413, 415, 417, 419, 421, 423, 425, 427, 429, 431, 433, 435, 437, 439, 441, 443, 445, 447, 449, 451, 453, 455, 457, 459, 461, 463, 465, 467, 469, 471, 473, 475, 477, 479, 481, 483, 485, 487, 489, 491, 493, 495, 497, 399, 401, 403, 405, 407, 409, 411, 413, 415, 417, 419, 421, 423, 425, 427, 429, 431, 433, 435, 437, 439, 441, 443, 445, 447, 449, 451, 453, 455, 457, 459, 461, 463, 465, 467, 469, 471, 473, 475, 477, 479, 481, 483, 485, 487, 489, 491, 493, 495, 497, 499, 501, 503, 505, 507, 509, 511, 513, 515, 517, 519, 521, 523, 525, 527, 529, 531, 533, 535, 537, 539, 541, 543, 545, 547, 549, 551, 553, 555, 557, 559, 561, 563, 565, 567, 569, 571, 573, 575, 577, 579, 581, 583, 585, 587, 589, 591, 593, 595, 597, 599, 601, 603, 605, 607, 609, 611, 613, 615, 617, 619, 621, 623, 625, 627, 629, 631, 633, 635, 637, 639, 641, 643, 645, 647, 649, 651, 653, 655, 657, 659, 661, 663, 665, 667, 669, 671, 673, 675, 677, 679, 681, 683, 685, 687, 689, 691, 693, 695, 697, 699, 701, 703, 705, 707, 709, 711, 713, 715, 717, 719, 721, 723, 275, 727, 729, 731, 733, 735, 737, 739, 741, 743, 745, 747, 749, 751, 753, 755, 757, 759, 761, 763, 765, 767, 769, 771, 773, 775, 777, 779, 781, 783, 785, 787, 789, 791, 793, 795, 797, 799, 801, 803, 805, 807, 809, 811, 813, 815, 817, 819, 821, 823, 825, or 827.

[0359] In some embodiments, the engineered RNA polymerase comprises an amino acid sequence comprising SEQ ID NO: 3, 5, 7, 9, 11, 13, 15, 17, 19, 21, 23, 25, 27, 29, 31, 33, 35, 37, 39, 41, 43, 45, 47, 49, 51, 53, 55, 57, 59, 61, 63, 65, 67, 69, 71, 73, 75, 77, 79, 81, 83, 85, 87, 89, 91, 93, 95, 97, 99, 101, 103, 105, 107, 109, 111, 113, 115, 117, 119, 121, 123, 125, 127, 129, 131, 133, 135, 137, 139, 141, 143, 145, 147, 149, 151, 153, 155, 157, 159, 161, 163, 165, 167, 169, 171, 173, 175, 177, 179, 181, 183, 185, 187, 189, 191, 193, 195, 197, 199, 201, 203, 205, 207, 209, 211, 213, 215, 217, 219, 221, 223, 225, 227, 229, 231, 233, 235, 237, 239, 241, 243, 245, 247, 249, 251, 253, 255, 257, 259, 261, 263, 265, 267, 269, 271, 273, 275, 277, 279, 281, 283, 285, 287, 289, 291, 293, 295, 297, 299, 301, 303, 305, 307, 309, 311, 313, 315, 317, 319, 321, 323, 325, 327, 329, 331, 333, 335, 337, 339, 341, 343, 345, 347, 349, 351, 353, 355, 357, 359, 361, 363, 365, 367, 369, 371, 373, 375, 377, 379, 381, 383, 385, 387, 389, 391, 393, 395, 397, 399, 401, 403, 405, 407, 409, 411, 413, 415, 417, 419, 421, 423, 425, 427, 429, 431, 433, 435, 437, 439, 441, 443, 445, 447, 449, 451, 453, 455, 457, 459, 461, 463, 465, 467, 469, 471, 473, 475, 477, 479, 481, 483, 485, 487, 489, 491, 493, 495, 497, 399, 401, 403, 405, 407, 409, 411, 413, 415, 417, 419, 421, 423, 425, 427, 429, 431, 433, 435, 437, 439, 441, 443, 445, 447, 449, 451, 453, 455, 457, 459, 461, 463, 465, 467, 469, 471, 473, 475, 477, 479, 481, 483, 485, 487, 489, 491, 493, 495, 497, 499, 501, 503, 505, 507, 509, 511, 513, 515, 517, 519, 521, 523, 525, 527, 529, 531, 533, 535, 537, 539, 541, 543, 545, 547, 549, 551, 553, 555, 557, 559, 561, 563, 565, 567, 569, 571, 573, 575, 577, 579, 581, 583, 585, 587, 589, 591, 593, 595, 597, 599, 601, 603, 605, 607, 609, 611, 613, 615, 617, 619, 621, 623, 625, 627, 629, 631, 633, 635, 637, 639, 641, 643, 645, 647, 649, 651, 653, 655, 657, 659, 661, 663, 665, 667, 669, 671, 673, 675, 677, 679, 681, 683, 685, 687, 689, 691, 693, 695, 697, 699, 701, 703, 705, 707, 709, 711, 713, 715, 717, 719, 721, 723, 275, 727, 729, 731, 733, 735, 737, 739, 741, 743, 745, 747, 749, 751, 753, 755, 757, 759, 761, 763, 765, 767, 769, 771, 773, 775, 777, 779, 781, 783, 785, 787, 789, 791, 793, 795, 797, 799, 801, 803, 805, 807, 809, 811, 813, 815, 817, 819, 821, 823, 825, or 827.

[0360] In some embodiments, a recombinant polynucleotide encoding any of the RNA polymerase herein is manipulated in a variety of ways to facilitate expression of the RNA polymerase polypeptide. As such, in some embodiments, the present disclosure provides an expression vector comprising a recombinant polynucleotide encoding an engineered RNA polymerase described herein. In some embodiments, the expression vector comprises one or more control sequences operably linked to the recombinant polynucleotide to regulate expression of the RNA polymerase encoding polynucleotides and/or expression of the corresponding polypeptides. In some embodiments, the control sequence includes, among others, promoters, leader sequences, polyadenylation sequences, propeptide sequences, signal peptide sequences, and transcription terminators. In some embodiments, the control sequences are selected depending on the type of hosts into which the expression vectors are to be introduced.

[0361] In some embodiments, suitable promoters are selected based on the host cells. For bacterial host cells, suitable promoters for directing transcription of the nucleic acid constructs of the present disclosure, include, but are not limited to promoters obtained from the E. coli lac operon, Streptomyces coelicolor agarase gene (dagA), Bacillus subtilis levansucrase gene (sacB), Bacillus licheniformis alpha-amylase gene (amyL), Bacillus stearothermophilus maltogenic amylase gene (amyM), Bacillus amyloliquefaciens alpha-amylase gene (amyQ), Bacillus licheniformis penicillinase gene (penP), Bacillus subtilis xylA and xylB genes, and prokaryotic beta-lactamase gene (see, e.g., Villa-Kamaroff et al., Proc. Natl Acad. Sci. USA, 1978, 75:3727-3731), as well as the tac promoter (see, e.g., DeBoer et al., Proc. Natl Acad. Sci. USA, 1983, 80:21-25). Exemplary promoters for filamentous fungal host cells, include, but are not limited to promoters obtained from the genes for Aspergillus oryzae TAKA amylase, Rhizomucor miehei aspartic proteinase, Aspergillus niger neutral alpha-amylase, Aspergillus niger acid stable alpha-amylase, Aspergillus niger or Aspergillus awamori glucoamylase (glaA), Rhizomucor miehei lipase, Aspergillus oryzae alkaline protease, Aspergillus oryzae triose phosphate isomerase, Aspergillus nidulans acetamidase, and Fusarium oxysporum trypsin-like protease (see, e.g., WO 96/00787), as well as the NA2-tpi promoter (a hybrid of the promoters from the genes for Aspergillus niger neutral alpha-amylase and Aspergillus oryzae triose phosphate isomerase), and mutant, truncated, and hybrid promoters thereof. Exemplary yeast cell promoters can be from the genes for Saccharomyces cerevisiae enolase (ENO-1), Saccharomyces cerevisiae galactokinase (GAL1), Saccharomyces cerevisiae alcohol dehydrogenase/glyceraldehyde-3-phosphate dehydrogenase (ADH2/GAP), and Saccharomyces cerevisiae 3-phosphoglycerate kinase. Other useful promoters for yeast host cells are known in the art (see, e.g., Romanos et al., Yeast, 1992, 8:423-488). Exemplary promoters for use in insect cells include, but are not limited to, polyhedrin, p10, ELT, OpIE2, and hr5/ie1 promoters. Exemplary promoters for use in mammalian cells include, but are not limited to, those from cytomegalovirus (CMV), chicken β-actin promoter fused with the CMV enhancer, Simian virus 40 (SV40), from Homo sapiens phosphoglycerate kinase, beta actin, elongation factor-1a or glyceraldehyde-3-phosphate dehydrogenase, or from Gallus β-actin.

[0362] In some embodiments, the control sequence is a suitable transcription terminator sequence (i.e., a sequence recognized by a host cell to terminate transcription). In some embodiments, the terminator sequence is operably linked to the 3′ terminus of the nucleic acid sequence encoding the RNA polymerase polypeptide. Any suitable terminator which is functional in the host cell of choice finds use in the present invention. For bacterial expression, the transcription terminators can be a Rho-dependent terminators that rely on a Rho transcription factor, or a Rho-independent, or intrinsic terminators, which do not require a transcription factor. Exemplary bacterial transcription terminators are described in Peters et al., J Mol Biol., 2011, 412(5):793-813. Exemplary transcription terminators for filamentous fungal host cells can be obtained from the genes for Aspergillus oryzae TAKA amylase, Aspergillus niger glucoamylase, Aspergillus nidulans anthranilate synthase, Aspergillus niger alpha-glucosidase, and Fusarium oxysporum trypsin-like protease. Exemplary terminators for yeast host cells can be obtained from the genes for Saccharomyces cerevisiae enolase, Saccharomyces cerevisiae cytochrome C (CYC1), and Saccharomyces cerevisiae glyceraldehyde-3-phosphate dehydrogenase. Other useful terminators for yeast host cells are known in the art (see, e.g., Romanos et al., supra). Exemplary terminators for insect cells and mammalian cells include, but are not limited to, those from cytomegalovirus (CMV), Simian virus 40 (SV40), from Homo sapiens growth hormone hGH, from bovine growth hormone BGH, and from human or rabbit beta globulin.

[0363] In some embodiments, the control sequence is a suitable leader sequence, a non-translated region of an mRNA that is important for translation by the host cell. In some embodiments, the leader sequence is operably linked to the 5′ terminus of the nucleic acid sequence encoding the RNA polymerase polypeptide. Any suitable leader sequence that is functional in the host cell of choice find use in the present disclosure. Exemplary leaders for filamentous fungal host cells are obtained from the genes for Aspergillus oryzae TAKA amylase, and Aspergillus nidulans triose phosphate isomerase. Suitable leaders for yeast host cells are obtained from the genes for Saccharomyces cerevisiae enolase (ENO-1), Saccharomyces cerevisiae 3-phosphoglycerate kinase, Saccharomyces cerevisiae alpha-factor, and Saccharomyces cerevisiae alcohol dehydrogenase/glyceraldehyde-3-phosphate dehydrogenase (ADH2/GAP). Suitable leaders for mammalian host cells include but are not limited to the 5′-UTR element present in orthopoxvirus mRNA.

[0364] In some embodiments, the control sequence is a polyadenylation sequence (i.e., a sequence operably linked to the 3′ terminus of the nucleic acid sequence and which, when transcribed, is recognized by the host cell as a signal to add polyadenosine residues to transcribed mRNA). Any suitable polyadenylation sequence which is functional in the host cell of choice finds use in the present invention. Exemplary polyadenylation sequences for filamentous fungal host cells include, but are not limited to the genes for Aspergillus oryzae TAKA amylase, Aspergillus niger glucoamylase, Aspergillus nidulans anthranilate synthase, Fusarium oxysporum trypsin-like protease, and Aspergillus niger alpha-glucosidase. Useful polyadenylation sequences for yeast host cells are known (see, e.g., Guo and Sherman, Mol. Cell. Biol., 1995, 15:5983-5990). Useful polyadenylation and 3′ UTR sequences for mammalian host cells include, but are not limited to, the 3′-UTRs of α- and β-globin mRNAs that harbor several sequence elements that increase the stability and translation of mRNA.

[0365] In some embodiments, the control sequence is also a signal peptide (i.e., a coding region that codes for an amino acid sequence linked to the amino terminus of a polypeptide and directs the encoded polypeptide into the cell's secretory pathway). In some embodiments, the 5′ end of the coding sequence of the nucleic acid sequence inherently contains a signal peptide coding region naturally linked in translation reading frame with the segment of the coding region that encodes the secreted polypeptide. Alternatively, in some embodiments, the 5′ end of the coding sequence contains a signal peptide coding region that is foreign to the coding sequence. Any suitable signal peptide coding region which directs the expressed polypeptide into the secretory pathway of a host cell of choice finds use for expression of the engineered polypeptide(s). Effective signal peptide coding regions for bacterial host cells are the signal peptide coding regions include, but are not limited to those obtained from the genes for Bacillus NCIB 11837 maltogenic amylase, Bacillus stearothermophilus alpha-amylase, Bacillus licheniformis subtilisin, Bacillus licheniformis beta-lactamase, Bacillus stearothermophilus neutral proteases (nprT, nprS, nprM), and Bacillus subtilis prsA. Further signal peptides are known in the art (see, e.g., Simonen and Palva, Microbiol. Rev., 1993, 57:109-137). In some embodiments, effective signal peptide coding regions for filamentous fungal host cells include, but are not limited to the signal peptide coding regions obtained from the genes for Aspergillus oryzae TAKA amylase, Aspergillus niger neutral amylase, Aspergillus niger glucoamylase, Rhizomucor miehei aspartic proteinase, Humicola insolens cellulase, and Humicola lanuginosa lipase. Useful signal peptides for yeast host cells include, but are not limited to those from the genes for Saccharomyces cerevisiae alpha-factor and Saccharomyces cerevisiae invertase. Useful signal peptides for mammalian host cells include but are not limited to those from the genes for immunoglobulin gamma (IgG) or other secreted human proteins, e.g., human beta-galactosidase polypeptide.

[0366] In some embodiments, the control sequence is a propeptide coding region that codes for an amino acid sequence positioned at the amino terminus of a polypeptide. The resultant polypeptide is referred to as a “proenzyme,” “propolypeptide,” or “zymogen.” A propolypeptide can be converted to a mature active polypeptide by catalytic or autocatalytic cleavage of the propeptide from the propolypeptide. The propeptide coding region may be obtained from any suitable source, including, but not limited to the genes for Bacillus subtilis alkaline protease (aprE), Bacillus subtilis neutral protease (nprT), Saccharomyces cerevisiae alpha-factor, Rhizomucor miehei aspartic proteinase, and Myceliophthora thermophila lactase (see, e.g., WO95/33836). Where both signal peptide and propeptide regions are present at the amino terminus of a polypeptide, the propeptide region is positioned next to the amino terminus of a polypeptide and the signal peptide region is positioned next to the amino terminus of the propeptide region.

[0367] In some embodiments, the control sequence comprises one or more regulatory sequences that facilitate regulation of the expression of the polynucleotide and/or corresponding encoded polypeptide relative to the growth of the host cell. Examples of regulatory systems are those that cause the expression of the gene to be turned on or off in response to a chemical or physical stimulus, including the presence of a regulatory compound. In prokaryotic host cells, suitable regulatory sequences include, but are not limited to the lac, tac, and trp operator systems. In yeast host cells, suitable regulatory systems include, but are not limited to the ADH2 system or GAL1 system. In filamentous fungi, suitable regulatory sequences include, but are not limited to the TAKA alpha-amylase promoter, Aspergillus niger glucoamylase promoter, and Aspergillus oryzae glucoamylase promoter. Exemplary inducible promoters regulated by exogenous agents include the zinc-inducible sheep metallothionine (MT) promoter, dexamethasone (Dex)-inducible promoter, mouse mammary tumor virus (MMTV) promoter; ecdysone insect promoter, tetracycline-inducible promoter system, RU486-inducible promoter system, and the rapamycin-inducible promoter system.

[0368] The recombinant expression vector may be any suitable vector (e.g., a plasmid or virus), that can be conveniently subjected to recombinant DNA procedures and bring about the expression of the engineered RNA polymerase. The choice of the vector typically is selected based on the compatibility of the vector with the host cell into which the vector is to be introduced. The vectors may be linear or closed circular plasmids.

[0369] In some embodiments, the expression vector is an autonomously replicating vector (i.e., a vector that exists as an extra-chromosomal entity, the replication of which is independent of chromosomal replication, such as a plasmid, an extra-chromosomal element, a minichromosome, or an artificial chromosome). The vector may contain any means for assuring self-replication, e.g., origin of replication. In some alternative embodiments, the vector is one in which, when introduced into the host cell, it is integrated into the genome and replicated together with the chromosome(s) into which it has been integrated. Furthermore, in some embodiments, a single vector or plasmid, or two or more vectors or plasmids which together contain the total DNA to be introduced into the genome of the host cell, and/or a transposon is utilized.

[0370] In some embodiment, the recombinant polynucleotides may be provided on a non-replicating expression vector or plasmid. In some embodiments, the non-replicating expression vector or plasmid can be based on viral vectors defective in replication (see, e.g., Travieso et al., npj Vaccines, 2022, Vol. 7, Article 75).

[0371] In some embodiments, the expression vector contains one or more selectable markers, which permit easy selection of transformed cells. A “selectable marker” is a gene, the product of which provides for biocide or viral resistance, resistance to heavy metals, prototrophy to auxotrophs, and the like. Examples of bacterial selectable markers include, but are not limited to the dal genes from Bacillus subtilis or Bacillus licheniformis, or markers, which confer antibiotic resistance such as ampicillin, kanamycin, chloramphenicol, or tetracycline resistance. Suitable markers for yeast host cells include, but are not limited to ADE2, HIS3, LEU2, LYS2, MET3, TRP1, and URA3. Selectable markers for use in filamentous fungal host cells include, but are not limited to, amdS (acetamidase; e.g., from A. nidulans or A. orzyae), argB (ornithine carbamoyltransferases), bar (phosphinothricin acetyltransferase; e.g., from S. hygroscopicus), hph (hygromycin phosphotransferase), niaD (nitrate reductase), pyrG (orotidine-5′-phosphate decarboxylase; e.g., from A. nidulans or A. orzyae), sC (sulfate adenyltransferase), and trpC (anthranilate synthase), as well as equivalents thereof. Selectable marker for mammalian cells include, but are not limited to, chloramphenicol acetyl transferase (CAT), nourseothricin N-acetyl transferase, blasticidin-S deaminase, blastcidin S acetyltransferase, Sh ble (Zeocin® resistance), aminoglycoside 3′-phosphotransferase (neomycin resistance), hph (hygromycin resistance), thymidine kinase, and puromycin N-acetyl-transferase.

[0372] In another aspect, the present disclosure provides a host cell comprising a polynucleotide encoding at least one engineered RNA polymerase polypeptide of the present disclosure, the polynucleotide(s) being operably linked to one or more control sequences for expression of the engineered RNA polymerase polypeptide(s) in the host cell. In some embodiments, the host cell comprises an expression vector comprising a polynucleotide encoding an engineered RNA polymerase polypeptide described herein, where the polynucleotide is operably linked to one or more control sequences. Host cells suitable for use in expressing the polypeptides encoded by the expression vectors of the present disclosure are known in the art and include but are not limited to, bacterial cells, such as E. coli, B. subtilis, Vibrio fluvialis, Streptomyces and Salmonella typhimurium cells; fungal cells, such as yeast cells (e.g., Saccharomyces cerevisiae or Pichia pastoris (ATCC Accession No. 201178)); insect cells such as Drosophila S2 and Spodoptera Sf9 cells; animal cells such as CHO, COS, BHK, 293, and Bowes melanoma cells; and plant cells. Exemplary host cells also include various Escherichia coli strains (e.g., W3110 (ΔfhuA) and BL21).

[0373] In another aspect, the present disclosure provides a method of producing the engineered RNA polymerase polypeptides, where the method comprises culturing a host cell capable of expressing a polynucleotide encoding the engineered RNA polymerase polypeptide under conditions suitable for expression of the polypeptide such that the engineered RNA polymerase is produced. In some embodiments, the method further comprises the step of isolating and/or purifying the RNA polymerase polypeptides, as described herein.

[0374] Appropriate culture media and growth conditions for host cells are known in the art. It is contemplated that any suitable method for introducing polynucleotides for expression of the RNA polymerase polypeptides into cells will find use in the present invention. Suitable techniques include, but are not limited to electroporation, biolistic particle bombardment, liposome mediated transfection, calcium chloride transfection, and protoplast fusion.

[0375] In some embodiments, the recombinant polypeptides (e.g., engineered RNA polymerase polypeptides) can be produced using any suitable methods known the art. For example, a wide variety of different mutagenesis techniques are available to the person of skill in the art. In addition, mutagenesis kits are also available from many commercial molecular biology suppliers. Methods are available to make specific substitutions at defined amino acids (site-directed), specific or random mutations in a localized region of the gene (region-specific), or random mutagenesis over the entire gene (e.g., saturation mutagenesis). Numerous methods known to those in the art to generate polypeptide variants, include, by way of example and not limitation, site-directed mutagenesis of single-stranded DNA or double-stranded DNA using PCR, cassette mutagenesis, gene synthesis, error-prone PCR, shuffling, and chemical saturation mutagenesis, or any other suitable method known in the art. Non-limiting examples of methods used for DNA and protein engineering are provided in the following patents: U.S. Pat. Nos. 6,117,679; 6,420,175; 6,376,246; 6,586,182; 7,747,391; 7,747,393; 7,783,428; and 8,383,346. After the variants are produced, they can be screened for any desired property (e.g., high or increased activity, or low or reduced activity, increased thermal activity, increased stability, increased substrate range, increased fidelity, increased salt tolerance, and/or pH stability, etc.).

[0376] In some embodiments, the engineered RNA polymerase polypeptides with the properties disclosed herein can be obtained by subjecting the polynucleotide encoding the naturally occurring or engineered RNA polymerase polypeptide to a suitable mutagenesis and/or directed evolution methods known in the art, for example, as described herein. An exemplary directed evolution technique is mutagenesis and/or DNA shuffling (see, e.g., Stemmer, Proc. Natl. Acad. Sci. USA, 1994, 91:10747-10751; WO 95/22625; WO 97/0078; WO 97/35966; WO 98/27230; WO 00/42651; WO 01/75767 and U.S. Pat. No. 6,537,746). Other directed evolution procedures that can be used include, among others, staggered extension process (StEP), in vitro recombination (see, e.g., Zhao et al., Nat. Biotechnol., 1998, 16:258-261), mutagenic PCR (see, e.g., Caldwell et al., PCR Methods Appl., 1994, 3:S136-S140), and cassette mutagenesis (see, e.g., Black et al., Proc. Natl. Acad. Sci. USA, 1996, 93:3525-3529).

[0377] Mutagenesis and directed evolution methods can be applied to RNA polymerase-encoding polynucleotides to generate variant libraries that can be expressed, screened, and assayed. Any suitable mutagenesis and directed evolution methods find use in the present disclosure and are known in the art (see, e.g., U.S. Pat. Nos. 5,605,793, 5,811,238, 5,830,721, 5,834,252, 5,837,458, 5,928,905, 6,096,548, 6,117,679, 6,132,970, 6,165,793, 6,180,406, 6,251,674, 6,265,201, 6,277,638, 6,287,861, 6,287,862, 6,291,242, 6,297,053, 6,303,344, 6,309,883, 6,319,713, 6,319,714, 6,323,030, 6,326,204, 6,335,160, 6,335,198, 6,344,356, 6,352,859, 6,355,484, 6,358,740, 6,358,742, 6,365,377, 6,365,408, 6,368,861, 6,372,497, 6,337,186, 6,376,246, 6,379,964, 6,387,702, 6,391,552, 6,391,640, 6,395,547, 6,406,855, 6,406,910, 6,413,745, 6,413,774, 6,420,175, 6,423,542, 6,426,224, 6,436,675, 6,444,468, 6,455,253, 6,479,652, 6,482,647, 6,483,011, 6,484,105, 6,489,146, 6,500,617, 6,500,639, 6,506,602, 6,506,603, 6,518,065, 6,519,065, 6,521,453, 6,528,311, 6,537,746, 6,573,098, 6,576,467, 6,579,678, 6,586,182, 6,602,986, 6,605,430, 6,613,514, 6,653,072, 6,686,515, 6,703,240, 6,716,631, 6,825,001, 6,902,922, 6,917,882, 6,946,296, 6,961,664, 6,995,017, 7,024,312, 7,058,515, 7,105,297, 7,148,054, 7,220,566, 7,288,375, 7,384,387, 7,421,347, 7,430,477, 7,462,469, 7,534,564, 7,620,500, 7,620,502, 7,629,170, 7,702,464, 7,747,391, 7,747,393, 7,751,986, 7,776,598, 7,783,428, 7,795,030, 7,853,410, 7,868,138, 7,783,428, 7,873,477, 7,873,499, 7,904,249, 7,957,912, 7,981,614, 8,014,961, 8,029,988, 8,048,674, 8,058,001, 8,076,138, 8,108,150, 8,170,806, 8,224,580, 8,377,681, 8,383,346, 8,457,903, 8,504,498, 8,589,085, 8,762,066, 8,768,871, 9,593,326, 9,665,694, 9,684,771, and all related PCT and non-US counterparts; Ling et al., Anal. Biochem., 1997, 254(2):157-78; Dale et al., Meth. Mol. Biol., 1996, 57:369-74; Smith, Ann. Rev. Genet., 1985, 19:423-462; Botstein et al., Science, 1985, 229:1193-1201; Carter, Biochem. J., 1986, 237:1-7; Kramer et al., Cell, 1984, 38:879-887; Wells et al., Gene, 1985, 34:315-323; Minshull et al., Curr. Op. Chem. Biol., 1999, 3:284-290; Christians et al., Nat. Biotechnol., 1999, 17:259-264; Crameri et al., Nature, 1998, 391:288-291; Crameri, et al., Nat. Biotechnol., 1997, 15:436-438; Zhang et al., Proc. Nat. Acad. Sci. U.S.A., 1997, 94:4504-4509; Crameri et al., Nat. Biotechnol., 1996, 14:315-319; Stemmer, Nature, 1994, 366:389-391; Stemmer, Proc. Nat. Acad. Sci. USA, 1994, 91:10747-10751; EP 3 049 973; WO 95/22625; WO 97/0078; WO 97/35966; WO 98/27230; WO 00/42651; WO 01/75767; WO 2009/152336; and WO 2015/048573, all of which are incorporated herein by reference).

[0378] In some embodiments, the clones obtained following mutagenesis treatment are screened by subjecting the polypeptide preparations to a defined treatment conditions or assay conditions (e.g., buffer, temperature, pH condition, DNA template, etc.) and measuring polypeptide activity after the treatments or other suitable assay conditions. Clones containing a polynucleotide encoding the polypeptide of interest are then isolated, the polynucleotide sequenced to identify the nucleotide sequence changes (if any), and used to express the polypeptide in a host cell. Measuring polypeptide activity from the expression libraries can be performed using any suitable method known in the art and as described in the Examples.

[0379] For engineered polypeptides of known sequence, the polynucleotides encoding the polypeptide can be prepared by standard solid-phase methods, according to known synthetic methods. In some embodiments, fragments of up to about 100 bases can be individually synthesized, then joined (e.g., by enzymatic or chemical ligation methods, or polymerase mediated methods) to form any desired continuous sequence (see, e.g., Hughes et al., Cold Spring Harb Perspect Biol. 2017 January; 9(1):a023812). For example, polynucleotides and oligonucleotides disclosed herein can be prepared by chemical synthesis using the classical phosphoramidite method (see, e.g., Beaucage et al., Tet. Lett., 1981, 22:1859-69; and Matthes et al., EMBO J., 1984, 3:801-05), as it is typically practiced in automated synthetic methods. According to the phosphoramidite method, oligonucleotides are synthesized (e.g., in an automatic DNA synthesizer, purified, annealed, ligated, and cloned in appropriate vectors).

[0380] In some embodiments, a method for preparing the engineered RNA polymerase polypeptide can comprise: (a) synthesizing a polynucleotide encoding a polypeptide comprising an amino acid sequence selected from the amino acid sequence of any variant as described herein, and (b) expressing the RNA polymerase polypeptide encoded by the polynucleotide. In some embodiments of the method, the amino acid sequence encoded by the polynucleotide can optionally have one or several (e.g., up to 3, 4, 5, or up to 10) amino acid residue deletions, insertions and/or substitutions. In some embodiments, the amino acid sequence has optionally 1-2, 1-3, 1-4, 1-5, 1-6, 1-7, 1-8, 1-9, 1-10, 1-15, 1-20, 1-21, 1-22, 1-23, 1-24, 1-25, 1-30, 1-35, 1-40, 1- 45, or 1-50 amino acid residue deletions, insertions and/or substitutions. In some embodiments, the amino acid sequence has optionally 1, 2, 3, 4, 5, 6, 7, 8, 9, 10, 11, 12, 13, 14, 15, 16, 17, 18, 19, 20, 21, 22, 23, 24, 25, 30, 30, 35, 40, 45, or 50 amino acid residue deletions, insertions and/or substitutions. In some embodiments, the amino acid sequence has optionally 1, 2, 3, 4, 5, 6, 7, 8, 9, 10, 11, 12, 13, 14, 15, 16, 18, 20, 21, 22, 23, 24, or 25 amino acid residue deletions, insertions and/or substitutions. In some embodiments, the substitutions are conservative or non-conservative substitutions.

[0381] In some embodiments, any of the engineered RNA polymerase polypeptides expressed in a host cell are recovered and/or purified from the cells and/or the culture medium using any one or more of the known techniques for protein purification, including, among others, lysozyme treatment, sonication, filtration, salting-out, selective precipitation, ultra-centrifugation, and chromatography.

[0382] Chromatographic techniques for isolation and purification of the RNA polymerase polypeptides include, among others, reverse phase chromatography, high-performance liquid chromatography, ion-exchange chromatography, hydrophobic-interaction chromatography, size-exclusion chromatography, gel electrophoresis, and affinity chromatography. Conditions for purifying a particular polypeptide may depend, in part, on factors such as net charge, hydrophobicity, hydrophilicity, molecular weight, molecular shape, etc., and will be apparent to those having skill in the art. In some embodiments, affinity techniques may be used to isolate the improved RNA polymerase polypeptides. For affinity chromatography purification, any antibody that specifically binds an RNA polymerase polypeptide of interest can be used. For the production of antibodies, various host animals, including but not limited to rabbits, mice, rats, etc., are immunized by injection with an RNA polymerase polypeptide, or a fragment thereof. In some embodiments, the RNA polymerase polypeptide or fragment is attached to a suitable carrier, such as BSA, by means of a side chain functional group or linkers attached to a side chain functional group. Where the engineered RNA polymerase includes a fusion polypeptide that allows for affinity purification, such as a His-tag, standard affinity methods for the particular fusion protein can be used.

### Compositions

[0383] In a further aspect, the present disclosure provides compositions of the engineered RNA polymerases disclosed herein. In some embodiments, the engineered RNA polymerase polypeptide in the composition is isolated or purified. In some embodiments, the RNA polymerase is combined with other components and compounds to provide compositions and formulations comprising the engineered RNA polymerase polypeptide as appropriate for different applications and uses.

[0384] In some embodiments, the composition comprises at least one engineered RNA polymerase described herein. For example, a composition comprises at least one engineered RNA polymerase exemplified in Tables 5.1, 6.1, 7.1, 8.1, 9.1, 10.1, 11.1, 12.1, 13.1, 14.1, 15.1, 16.1, 17.1, 18.1, 19.1, 23.1 and 24.1, and the Sequence Listing. In some embodiments, the composition comprising an engineered RNA polymerase is an aqueous solution. In some embodiments, the composition comprising an engineered RNA polymerase is a lyophilizate.

[0385] In some embodiments, the composition further comprises one or more of (i) buffer, ii) one or more rNTPs, (iii) Mg⁺², and (iv) a target DNA substrate/template. In some embodiments, the target DNA substrate is a double stranded DNA template and includes a promoter recognized by the engineered RNA polymerase. As further described herein, in some embodiments, the promoter sequence is a naturally occurring T7 RNA polymerase promoter, such as, for example, a class II or class III promoter. In some embodiments, the RNA polymerase promoter is a synthetic or hybrid T7 RNA polymerase promoter.

[0386] In some embodiments, the composition further comprises a reducing agent, such as dithiothreitol or mercaptoethanol. In some embodiments, the composition further comprises an additive, such as a molecular crowding agent or a promoter of RNA polymerase activity. In some embodiments, the molecular crowding agent, includes, among others, bovine serum albumin (BSA), polyethylene glycol, dextran, and Ficoll. In some embodiments, the additive for promoting RNA polymerase activity is a surfactant, including, among others, non-ionic detergents, e.g., Triton X-100, Tween 20, or NP-40, and a poly-amine, e.g., spermidine or spermine.

[0387] In some embodiments, the composition further comprises one or more oligonucleotide primers, which can be sequence specific primers and/or “random” or “universal” primers that can act as primers for extension by the engineered RNA polymerase. In some embodiments, the primer is an oligoribonucleotide primer (i.e., RNA primer).

[0388] In some embodiments, the composition further comprises a “cap” analog, for example, for co-transcriptional production of capped RNA transcripts. In some embodiments, the cap analog is a dinucleotide or trinucleotide cap analog. In some embodiments, the cap analog is a dinucleotide cap analog, including, among others, alpha, gamma-bis(N7-methylguanosine) triphosphate (m7G(5′)ppp(5′)m7G) or an anti-reverse cap analog 3′-O-Me-m7G(5′)ppp(5′)G. In some embodiments, the dinucleotide cap analog is alpha, gamma-bis(N7-methylguanosine) triphosphate. In some embodiments, the cap analog is a trinucleotide cap analog, including, among others, m7G(5′)ppp(5′)AmpG (GAG) and m7,3′-O-propargylG(5′)ppp(5′)AmpG, m7GpppApA, m7GpppApC, m7GpppApG, m7GpppApU. m7GpppCpA, m7GpppCpC, m7GpppCpG, m7GpppCpU, m7GpppGpA, m7GpppGpC, m7GpppGpG, m7GpppGpU, m7CpppUpA, m7GpppUpC, m7GpppUpG, and m7GpppUpU. In some embodiments, the cap analog is a tetranucleotide cap, including, among others, (m7GpppNmpGmpG) and cap2-1 (m7GpppNpGmpG). Dinucleotide and trinucleotide cap analogs are described in, among others, Shanmugasundaram et al., Chem Rec., 2022, 22(8): e202200005, and PCT patent publication WO20172239, incorporated by reference herein. Tetranucleotide caps are described in, among others, Drazkowska et al., Nucl Acids Res., 2022, 50(16):9051-9071. In some embodiments, the cap analogs are commercially available cap analogs, sold s Trilink® or CleanCap®.

[0389] In some embodiments, the trinucleotide cap is m7G3′OMepppApA, m7G3′OMepppApC, m7G3′OMepppApG, m7G3′OMepppApU, m7G3′OmepppCpA, m7G3′OMepppCPC, m7G3′OMepppCpG, m7G3′OMepppCpU, m7G3′OMepppGpA, m7G3′OMepppGpC, m7G3′OMepppGpG, m7C3′OMepppGpU, m7G3′OMepppUpA, m7C3′OMepppUpC, m7G3′OMepppUpG, or m7G3′OMepppUpU. In some embodiments, the trinucleotide cap is m7G3′OMepppA2′OMepA, m7G3′OMepppA2′OMepC, m7G3′OMepppA2′OMepG, m7C3′OMepppA 2′OMepU, m7G3′OMepppC2′OMepA, m7C3′OMeppppC2′OMepC, m7C3′OMepppC2′OMepCm7G3′OMepppC2′OMepU, m7G3′OMepppG2′OMepA. m7G3′OMeppppG2′OMepC, m7G3′OMepppG2′OMepG, m7G 3′OMepppC2′OMepU, m7G3′OMepppU2′OMepA, m7G3′OMepppU2′OMepC, m7G3′OMepppU2′OMepG, or m7G3′OMepppU2′OMepU. In some embodiments, the trinucleotide cap is m7GpppA2′OMepA, m7GpppA2′OMepC, m7GpppA2′OMepG, m7GpppA2′OMepU, m7GpppC2′OMepA, m7GpppC2′OMepC, m7GpppC2′OMepG, m7CpppC2′OMepU, m7GpppG2′OMepA. m7GpppG2′OMepC, m7CpppG2′OMepG, m7GpppG2′OMepU, m7GpppU2′OMepA, m7GpppU2′OMepC, m7GpppU2′OMepG, or m7GpppU2′OMepU.

[0390] In some embodiments, the composition further comprises a pyrophosphatase and/or an RNase inhibitor. In some embodiments, the pyrophosphatase is an inorganic pyrophosphatase. In some embodiments, the RNase inhibitor is a mammalian RNase inhibitor (e.g., placental RNase inhibitor or porcine RNase inhibitor) or a synthetic RNase inhibitor, e.g., RiboGrip®.

[0391] In some embodiments, an engineered RNA polymerase described herein is provided immobilized on a substrate or support medium, such as a solid substrate, a porous substrate, a membrane, or particles. The polypeptide can be entrapped in matrixes or membranes. In some embodiments, matrices include polymeric materials such as calcium-alginate, agar, k-carrageenin, polyacrylamide, and collagen. In some embodiments, the solid matrices, includes, among others, activated carbon, porous ceramic, and diatomaceous earth. In some embodiments, the matrix is a particle, a membrane, or a fiber. Types of membranes include, among others, nylon, cellulose, polysulfone, or polyacrylate.

[0392] In some embodiments, the RNA polymerase is immobilized on the surface of a support material. In some embodiments, the polypeptide is adsorbed on the support material. In some embodiments, the polypeptide is immobilized on the support material by covalent attachment. Support materials include, among others, inorganic materials, such as alumina, silica, porous glass, ceramics, diatomaceous earth, clay, and bentonite, or organic materials, such as cellulose (CMC, DEAE-cellulose), starch, activated carbon, polyacrylate, agarose or derivatives thereof (e.g., cross-linked agarose), polyacrylamide, polystyrene, and ion-exchange resins, such as Amberlite, Sephadex, and Dowex.

### Uses and Methods

[0393] In another aspect, the present disclosure provides uses of the engineered RNA polymerases for preparing an RNA of interest. In some embodiments, the engineered RNA polymerase is used for in vitro transcription reactions. In some embodiments, the engineered RNA polymerase is used to produce, by way of example and not limitation, mRNA, self-replicating RNA, circular RNA, shRNA, miRNA, and CRISPR guide RNA. In embodiments, the RNA produced is mRNA that encodes a polypeptide of interest, such as a polypeptide vaccine or a therapeutic polypeptide.

[0394] In some embodiments, a method of producing RNA comprises contacting a target DNA template with an engineered RNA polymerase described herein in the presence of one or more nucleotide triphosphates (NTPs) under suitable reaction conditions such that an RNA transcript of all or part of the target DNA template is produced. In some embodiments, the method further comprises providing a cap analog, such as a dinucleotide, trinucleotide, or tetranucleotide cap, as described herein.

[0395] In some embodiments, the NTPs are rNTPs. In some embodiments, the NTP substrates are modified nucleotides. In some embodiments, the modified nucleotides are naturally modified nucleotides, for example the modified nucleotides of choice are the naturally occurring 5′-methylcytidine and/or pseudouridine. In some embodiments, the modified nucleotides are 2′-ribose modified nucleotides, for example 2-O-methyl, 2′-O-ethyl, and 2′-halo (e.g., 2′-bromo, 2′-fluoro). In some embodiments, the modified nucleotides are base-modified nucleotides (see, e.g., Milisavljevi6 et al., Org. Biomol. Chem., 2018, 16, 5800-5807).

[0396] In some embodiments, the concentration of one or more of the NTP, such as rNTP is 0.5-15 mM, 1-12 mM, 2-10 mM, or 4-8 mM. In some embodiments the concentration of NTPs is about 0.1 mM, 0.5 mM, 1 mM, 2 mM, 3 mM, 4 mM, 5 mM, 6 mM, 7 mM, 8 mM, 9 mM, 10 mM, 12 mM, 15 mM, or 20 mM.

[0397] In some embodiments, the suitable conditions comprise a temperature of about 20° C. to about 45° C. In some embodiments, the suitable conditions comprises a temperature of about 25° C. to about 40° C. In some embodiments, the suitable conditions comprises a temperature of about 25° C. to about 37° C. In some embodiments, the suitable conditions comprises a temperature of about 30° C. to about 35° C. In some embodiments, the suitable conditions comprises a temperature of about 20° C., 25° C., 30° C., 35° C., 37° C., 40° C., or 45° C.

[0398] In some embodiments, the suitable conditions include a buffer and/or Mg+2. In some embodiments, the suitable conditions include a reducing agent, for example, dithiothreitol or mercaptoethanol. In some embodiments, the suitable reaction conditions further include an additive, for example, bovine serum albumin (BSA), glycerol, polyethylene glycol, dextran, Ficoll, spermidine, or spermine, as described above.

[0399] In some embodiments, the target DNA template is a double stranded DNA template that includes a promoter sequence recognized by the engineered RNA polymerase described herein. In some embodiments, the promoter sequence is a naturally occurring T7 RNA polymerase promoter, such as, for example, a class II or class III promoter (see, e.g., Ikeda et al., J Biol. Chem., 1992, 267(4):2640-2649). In some embodiments, the promoter is a hybrid or synthetic T7 promoter recognized by the engineered RNA polymerase of the present disclosure (see, e.g., Lieber et al., Eur. J. Biochem. 1993, 217:387-394).

[0400] In some embodiments, where a cap has not been provided in the transcription reaction for co-transcriptional capping, the method further comprises the step of capping the RNA transcript. In some embodiments, capping of the RNA is carried out by a capping enzyme, for example, Faustovirus or vaccinia virus capping enzyme.

[0401] In some embodiments, the method further comprises the step of poly-A tailing of the RNA transcript. In some embodiments, the step of poly-A tailing is added when the polynucleotide template does not have a sequence for generating a poly-A tail in the RNA transcription. In some embodiments, the step of poly-A tailing uses a poly(A) polymerase, which catalyzes the incorporation of adenine residues into the 3′ termini of an RNA. In some embodiments, the poly(A) polymerase is a bacterial poly(A) polymerase (e.g., E. coli.), a yeast poly(A) polymerase (e.g., Saccharomyces cerevisiae), or a mammalian poly(A) polymerase.

[0402] In some embodiments, the method further comprises presence of a pyrophosphatase in conjunction with the engineered RNA polymerase. In general, the pyrophosphatase is an inorganic pyrophosphatase.

[0403] In some embodiments, the method further comprises presence of an RNase inhibitor for inhibiting RNases that may be present in the reaction mixture.

[0404] In some embodiments, the method is used in the production of an RNA transcript that encodes a polypeptide of interest. In some embodiments, the polypeptide of interest is an enzyme, vaccine antigen, cytokine, growth factor, monoclonal antibody, structural polypeptide or protein, or a ligand or receptor polypeptide or protein.

[0405] In some embodiments, the DNA template and the corresponding RNA transcript produced encode a vaccine antigen or therapeutic polypeptide. In some embodiments, the DNA template and the RNA transcript produced encodes a vaccine antigen for stimulating an immune response to the antigen, for example to treat a disease condition or stimulate immunity against an infectious agent.

[0406] In some embodiments the DNA template and the corresponding RNA transcript encode a vaccine antigen of a microbial or viral polypeptide. Exemplary microbial polypeptides include, among others, Streptococcus (e.g., Group A or Group B antigens) and plague bacterium proteins (e.g., F1 protein). Exemplary viral peptides include peptides of, among others, human immunodeficiency virus (HIV), hepatitis virus (e.g., HAV, HBV, HCV, etc.), herpes simplex virus (e.g., HSV-1, HSV-2, etc.), herpes zoster virus, human papilloma virus, respiratory syncytial virus (RSV), coronavirus (e.g., SARS-CoV-2), measles virus, pox virus (e.g., small pox, monkey pox, etc.), rhabdovirus (e.g., rabies), influenza (e.g., H1N1, H10N8, H7N9, etc.), human metapneumovirus (HMPV) and parainfluenza virus Type 3 (PIV3), human cytomegalovirus, Zika virus, Epstein-Barr Virus (EBV), and the like.

[0407] In some embodiments, the DNA template and the corresponding RNA transcript encode a cancer or tumor antigen. Exemplary cancer antigens include, among others, mRNA vaccines encoding tumor-associated antigens (TAAs), for example overexpressed antigens EGFR, HER2, cancer testis antigens (CTAs); differentiation antigens, for example. PSA and gp100; oncofoetal antigens, for example 5T4 and CEA; and onco-viral antigens, for example HPV E6 and E7 oncogenic proteins. In some embodiments, the cancer or tumor antigen is a tumor specific antigen (TSA) or tumor associated antigens (TAA) or neoantigens which are derived from somatic mutations. Exemplary TAA, TSA, and neoantigens include, among others, NY-ESO-1, MAGE-C3, tyrosinase, TPTE, RBL038, RBL039, RBL-040, RBL-041, RBL-045, PSA, PSCA, PSMA, STEAP1, PAP, and MUC1.

[0408] In some embodiments, the DNA template and the corresponding RNA transcript encode a therapeutic polypeptide. Exemplary therapeutic polypeptide includes, among others, an enzyme (e.g., associated with a disease condition), a cytokine, a structural polypeptide or protein, and a ligand or receptor polypeptide or protein.

[0409] Exemplary cytokines include, among others, IL-1β, IL-6, TNFα, IL-12, IL-15, GM-CSF, IFNα, and GM-CSF. Exemplary ligand proteins or polypeptides include, among others, OX40 ligand (OX40L), 4-1BB ligand (4-1BBL), glucocorticoid-induced tumor necrosis factor receptor (GITR) ligand (GITRL), CD40 ligand (CD40L), inducible T cell co-stimulatory ligand (ICOSL), CD70 and caTLR4.

[0410] Exemplary therapeutic polypeptides include, among others, glucose-6-phosphatase (glycogen storage deficiency type IA); phosphoenolpyruvatecarboxykinase (Pepck deficiency); galactose-1 phosphate uridyl transferase (galactosemia); phenylalanine hydroxylase (phenylketonuria); branched chain alpha-ketoacid dehydrogenase (Maple syrup urine disease); fumarylacetoacetate hydrolase (tyrosinemia type 1); methylmalonyl-CoA mutase (methylmalonic academia); medium chain acyl CoA dehydrogenase, (medium chain acetyl CoA deficiency); ornithine transcarbamylase (ornithine transcarbamylase deficiency); argininosuccinic acid synthetase (citrullinemia); low density lipoprotein receptor protein (familial hypercholesterolemia); UDP-glucouronosyltransferase (Crigler-Najjar disease); adenosine deaminase (severe combined immunodeficiency disease); hypoxanthine guanine phosphoribosyl transferase (Gout and Lesch-Nyan syndrome); biotinidase (biotinidase deficiency); beta-glucocerebrosidase (Gaucher disease); beta-glucuronidase (Sly syndrome); peroxisome membrane protein 70 kDa (Zellweger syndrome); porphobilinogen deaminase (acute intermittent porphyria); alpha-1 antitrypsin (alpha-1 antitrypsin deficiency; emphysema); Factor VIII (hemophilia A); and erythropoietin (thalassemia).

[0411] In some embodiments, the method is used to produce a non-coding RNA (ncRNA), for example, shRNA, siRNA, miRNA, iRNA, etc. In some embodiments, by way of example and not limitation, the non-coding RNA molecule is a miRNA which regulates gene expression by targeting RNA transcript cleavage/degradation or 5 translational repression of the target messenger RNA (mRNA). In some embodiments, the non-coding RNA is an shRNA or siRNA. The shRNA or siRNA can be directed to any target RNA (see, e.g., Zhang et al., Biochemical Pharmacology, 2021, 189:114432; and Schaefer et al., 2018, PLOS ONE 13(1): e0191570).

[0412] In some embodiments, the DNA template and expressed RNA is one or more components of a gene editing system or recombination system. In some embodiments, the DNA template and corresponding RNA encodes a CRISPR associated protein 9 (Cas9) or expresses a guide RNA (gRNA). In some embodiments, the DNA template and the corresponding RNA encode a zinc-finger nuclease (ZFN) or transcription factor-like effector nucleases (TALEN). In some embodiments, the transgene comprises a polynucleotide encoding a recombinase, such as Cre recombinase or flp recombinase.

[0413] In some embodiments, the engineered RNA polymerase is used to produce RNA for use as probes. In some embodiments, labeled nucleotide triphosphate substrates or nucleotide analogs can be used in the RNA polymerase reaction to incorporate the labeled nucleotide or nucleotide analog into the synthesized RNA.

[0414] In a further aspect, the present disclosure provides a kit comprising an engineered RNA polymerase or a composition thereof described herein. In some embodiments, the kit further comprises at least a buffer. In some embodiments, the buffer includes a reducing agent, e.g., dithiothreitol or mercaptoethanol.

[0415] In some embodiments, the kit further comprises an additive, such as glycerol, polyethylene glycol (e.g., PEG 6000 and PEG 8000), Triton X-100, dextran, bovine serum albumin (BSA), Ficoll, spermidine, spermine or dithiothreitol (DTT). In some embodiments, the kit further comprises on or more NTPs, particularly rNTPs. In some embodiments, the engineered RNA polymerase in the kit is provided as a lyophilizate or in solution.

### EXAMPLES

[0416] The following Examples, including experiments and results achieved, are provided for illustrative purposes only and are not to be construed as limiting the present invention.

### Example 1

### E. coli Expression Hosts Containing Recombinant RNA Polymerases (RNAP) Genes

[0417] The initial RNA polymerase enzyme used to produce the variants of the present invention was SEQ ID NO: 2 cloned into the expression vector pCK110900 (See, FIG. 3 of US Pat. Appln. Publn. No. 2006/0195947) operatively linked to the lac promoter under control of the lac1 repressor. The expression vector also contains the P15a origin of replication and the chloramphenicol resistance gene. The resulting plasmids were transformed into E. coli W3110, using standard methods known in the art. The transformants were isolated by subjecting the cells to chloramphenicol selection, as known in the art (See e.g., U.S. Pat. No. 8,383,346 and WO2010/144103).

### Example 2

### Preparation of HTP RNA Polymerases (RNAP)-Containing Wet Cell Pellets

[0418] E. coli cells containing recombinant RNAP-encoding genes from monoclonal colonies were inoculated into 180 μL LB containing 1% glucose and 30 μg/mL chloramphenicol (CAM) in the wells of 96-well, shallow-well microtiter plates. The plates were sealed with O₂-permeable seals, and cultures were grown overnight at 30° C., 200 rpm, and 85% humidity. Then, 10 μL of each of the cell cultures were transferred into the wells of 96-well, deep-well plates containing 390 mL Terrific Broth (TB) and 30 μg/mL chloramphenicol (CAM). The deep-well plates were sealed with O₂-permeable seals and incubated at 30° C., 250 rpm, and 85% humidity until OD₆₀₀ 0.6-0.8 was reached. The cell cultures were then induced by isopropylthiogalactoside (IPTG) to a final concentration of 1 mM and incubated overnight under the same conditions as originally used. The cells were then pelleted using centrifugation at 4,000 rpm for 10 min. The supernatants were discarded, and the pellets were frozen at −80° C. prior to lysis.

### Example 3

### Preparation of HTP Purified RNA Polymerases

[0419] First, 400 μL lysis buffer containing 50 mM sodium phosphate pH 7.5, 2 mM magnesium sulfate, 0.1% (v/v) Tween-20, 0.2 g/L lysozyme, 0.5 g/L polymyxin B sulfate (PMBS), and 0.5 mM dithiothreitol (DTT) was added to the cell paste in each well, produced as described in Example 2. The cells were shaken on a bench top shaker at room temperature for 2 h to resuspend and lyse. Then, 40 μL of 5 M NaCl and 5 μL of 0.8 M imidazole were added to the lysed cells, which were centrifuged for 10 min at 4,000 rpm at 4° C. The supernatants were loaded onto the HisPur™ Ni-NTA Spin Plates, washed twice with 600 μL of washing buffer containing 50 mM sodium phosphate pH 7.5, 300 mM sodium chloride, 0.1% (v/v) Tween-20, 10 mM imidazole, and 0.5 mM DTT, and eluted twice with 90 μL of elution buffer containing 50 mM sodium phosphate pH 7.5, 300 mM sodium chloride, 0.1% (v/v) Tween-20, 250 mM imidazole, and 0.5 mM DTT. Then, the HisPur™ plate eluent was buffer-exchanged into 2× storage buffer containing 100 Tris-HCl pH 8.0, 200 mM sodium chloride, 0.2% (v/v) Triton X-100, 2 mM EDTA pH 8.0, and 10 mM DTT via Zeba™ Spin Desalting Plate (40 K MWCO) following the manufacture protocol. 70 μL of the Zeba™ plate eluent was mixed with equal volume of pure glycerol and stored at −20° C. prior to activity assays.

### Example 4

### Shake Flask Expression and Purification of RNA Polymerases

### Shake Flask Expression

[0420] Selected variant cultures grown as described above were plated onto LB agar plates with 1% glucose and 30 μg/mL chloramphenicol and grown overnight at 37° C. A single colony from each culture was transferred to 5 mL Luria Broth (LB) broth with 1% glucose and 30 μg/ml chloramphenicol. The cultures were grown for 20 h at 30° C. and 250 rpm and subcultured at a dilution of approximately 1:50 into 250 ml Terrific Broth with 30 μg/ml of chloramphenicol, to a final OD₆₀₀ of about 0.05. The cultures were incubated for approximately 195 min at 30° C. and 250 rpm, to an OD₆₀₀ of about 0.6, and then induced with the addition of IPTG at a final concentration of 1 mM. The induced cultures were incubated for 20 h at 30° C. and 250 rpm. The cultures were the centrifuged at 4000 rpm for 10 min. The culture supernatant was discarded and the pellets were resuspended in lysis buffer comprised of 50 mM sodium phosphate at pH 7.5, 10 mM imidazole, 500 mM sodium chloride, and 0.1% (v/v) Tween-20. This cell suspension was chilled in an ice bath and lysed using a Microfluidizer cell disruptor (Microfluidics M-110L). The crude lysate was pelleted by centrifugation (11,000 rpm for 60 min at 4° C.), and the supernatant was then filtered through a 0.2 μm PES membrane to further clarify the lysate.

Purification of RNAP from Shake Flask Lysates

[0421] Additional NaCl and imidazole were added to the clarified RNAP lysates to adjust the concentrations to 500 mM NaCl and 20 mM imidazole. Lysates were then purified using an AKTA Pure purification system and a 5 ml HisTrap FF column (GE Healthcare) using the AC Step HiF setting (the run parameters are provided below in Table 4.1). The wash buffer comprised 50 mM sodium phosphate pH 7.5, 500 mM sodium chloride, 25 mM imidazole, and 0.1% (v/v) Tween-20, and the elution buffer comprised 50 mM sodium phosphate pH 7.5, 500 mM sodium chloride, 300 mM imidazole, and 0.1% (v/v) Tween-20.

TABLE 4.1
Purification Parameters

| Parameter | Volume | |
|---|---|---|
| Column volume | 5 | mL |
| Flow rate | 5 | mL/min |
| Pressure limit | 0.3 | MPa |
| Sample volume | 45 | ml |
| Equilibration volume | 5 column volumes (CV) = 25 mL | |
| Wash Unbound volume | 15 CV = 75 mL | |
| Elution | Isocratic (step) | |
| Elution volume | 5 CV = 25 mL | |
| Fraction volume | 1.5 | mL |

| | |
|---|---|
| RE-equilibration volume | 5 CV = 25 mL |

[0422] The first 2 elution fractions with over 1 mg/mL protein were identified by absorption at 280 nm on a NanoDrop Microvolume Spectrophotometers and dialyzed overnight in dialysis buffer comprised of 25 mM HEPES pH 7.6, 150 mM sodium chloride, 0.1 mM EDTA, 0.09% Triton X-100, 10 mM dithiothreitol (DTT), and 50% glycerol in a 3.5 K Slide-A-Lyzer™ dialysis cassette (Thermo Fisher) for buffer exchange. Concentrations of purified and dialyzed RNA polymerase samples were measured by absorption at 280 nm.

### Example 5

### Improvements Over RNA Polymerase of SEQ ID NO: 2

[0423] SEQ ID NO: 2 was selected as the parent enzyme in an in vitro transcription (IVT) assay. Libraries of engineered genes were produced using known techniques (e.g., saturation mutagenesis, recombination of previously identified beneficial mutations). The polypeptides encoded by each gene were produced in HTP as described in Example 2 and purified as described in Example 3. Each variant was diluted 4-fold in RNase-free water and screened in a 1 μL reaction that comprised 0.05 μg/μL 9 kb-DNA template, 30 mM Tris-HCl pH 8.0, 26.9 mM magnesium chloride, 5 mM ATP, 5 mM GTP, 5 mM CTP, 5 mM UTP, 1 U/μL RNase inhibitor (New England Biolabs, Catalog #M0314L), and 0.002 U/μL IPPase (New England Biolabs, Catalog #M2403L). The reactions were initiated by adding 150 nL of the HTP purified variants, incubated in Bio-Rad Hard-Shell® 96-Well PCR plates at 37° C. for 2 h and quenched with 125 nL of 0.5 M EDTA. Quenched mixtures were diluted 100-fold with RNase-free water, and RNA concentrations were measure by using the Quant-iT™ RNA Assay Kits—Broad Range (Thermo Fisher, Catalog #Q10213). Activity relative to SEQ ID NO: 2 (Activity Fold Improvement Over Parent, FIOP) was calculated as the RNA produced by variant over the RNA produced by SEQ ID NO: 2. The result is shown in Table 5.1.

TABLE 5.1
Activities of Variants Relative to SEQ ID NO: 2

| SEQ ID | | FIOP Product |
|---|---|---|
| NO: | Amino Acid Differences | Relative to |
| (nt/aa) | (Relative toSEQ ID NO: 2) | SEQ ID NO: 2 |
| 3/4 | V401R/Y404L | +++ |
| 5/6 | K336S | +++ |
| 7/8 | N138R | ++ |
| 9/10 | K336V | ++ |
| 11/12 | V401R/I403V/Y404S | ++ |
| 13/14 | K336M/A510V | + |
| 15/16 | K336L | + |
| 17/18 | A388K | + |
| 19/20 | K340E | ++ |
| 21/22 | V401R/R402T/Y404S | + |
| 23/24 | W351L/R357E | + |
| 25/26 | V401R/Y404I | + |

Levels of increased activity were determined relative to the reference polypeptide of SEQ ID NO: 2 and defined as follows: ″″+″″ 1.01 to 1.10 (first 50%), ″″++″″ >1.10 (next 30%), ″″+++″″ >1.18 (top 20%)

### Example 6

### Improvements Over RNA Polymerase of SEQ ID NO: 4

[0424] SEQ ID NO: 4 was selected as the parent enzyme in the in vitro transcription (IVT) assay. Libraries of engineered genes were produced using known techniques (e.g., saturation mutagenesis, recombination of previously identified beneficial mutations). The polypeptides encoded by each gene were produced in HIP as described in Example 2 and purified as described in Example 3. Each variant was diluted 4-fold in RNase-free water and screened in a 1 μL reaction that comprised 0.05 μg/μL 9 kb-DNA template, 40 mM Tris-HCl pH 8.0, 30 mM magnesium acetate, 5 mM ATP, 5 mM GTP, 5 mM CTP, 5 mM UTP, 1 U/μL Ribolock RNase Inhibitor (Thermo Scientific, Catalog #E00382), and 0.002 U/μL Pyrophosphatase (Thermo Scientific, Catalog #EF0221). The reactions were initiated by adding 150 nL of the HIP purified variants, incubated in Bio-Rad Hard-Shell® 96-Well PCR plates at 37° C. for 2 h and quenched with 125 nL of 0.5 M EDTA. Quenched mixtures were diluted 100-fold with RNase-free water, and RNA concentrations were measure by using the Quant-iT™ RNA Assay Kits—Broad Range (Thermo Fisher, Catalog #Q10213). Activity relative to SEQ ID NO: 4 (Activity FIOP) was calculated as the RNA produced by variant over the RNA produced by SEQ ID NO: 4. The result is shown in Table 6.1.

TABLE 6.1
Activities of Variants Relative to SEQ ID NO: 4

| SEQ ID | | | FIOP Product |
|---|---|---|---|
| NO: | Amino Acid Differences | Amino Acid Differences | Relative to |
| (nt/aa) | (Relative to SEQ ID NO: 4) | (Relative to SEQ ID NO: 2) | SEQ ID NO: 4 |
| 27/28 | A311G/A388K/L404Y/N440K | A311G/A388K/V401R/N440K | +++ |
| 29/30 | N138R/K340W | N138R/K340W/V401R/Y404L | ++ |
| 31/32 | N138R/A311G/K336S/K340W/A388K | N138R/A311G/K336S/K340W/A388K/ | ++ |
| | | V401R/Y404L | |
| 33/34 | A311G/A388K/N440K | A311G/A388K/V401R/Y404L/N440K | + |
| 35/36 | N138R/A311G/K340E/A388K/L404Y/ | N138R/A311G/K340E/A388K/V401R/ | + |
| | N440K | N440K | |
| 37/38 | N138R/K336M/L342Q | N138R/K336M/L342Q/V401R/Y404L | + |
| 39/40 | W351L/A388K | W351L/A388K/V401R/Y404L | + |

Levels of increased activity were determined relative to the reference polypeptide of SEQ ID NO: 4 and defined as follows: ″″+″″ 1.01 to 1.10 (first 50%), ″″++″″ >1.10 (next 30%), ″″+++″″ >1.18 (top 20%)

### Example 7

### Improvements Over RNA Polymerase of SEQ ID NO: 32

[0425] SEQ ID NO: 32 was selected as the parent enzyme in the in vitro transcription (IVT) assay. Libraries of engineered genes were produced using known techniques (e.g., saturation mutagenesis, recombination of previously identified beneficial mutations). The polypeptides encoded by each gene were produced in HTP as described in Example 2 and purified as described in Example 3. Each variant was diluted 4-fold in RNase-free water and screened in a 1 μL reaction that comprised 0.05 μg/μL 8 kb-DNA template, 40 mM Tris-HCl pH 8.0, 30 mM magnesium acetate, 7.5 mM ATP, 7.5 mM GTP, 7.5 mM CTP, 7.5 mM UTP, 1 U/μL Ribolock RNase Inhibitor (Thermo Scientific, Catalog #E00382), and 0.002 U/μL Pyrophosphatase (Thermo Scientific, Catalog #EF0221). The reactions were initiated by adding 150 nL of the HTP purified variants, incubated in Bio-Rad Hard-Shell® 96-Well PCR plates at 37° C. for 2 h and quenched with 125 nL of 0.5 M EDTA. Quenched mixtures were diluted 100-fold with RNase-free water, and RNA concentrations were measure by using the Quant-iT™ RNA Assay Kits—Broad Range (Thermo Fisher, Catalog #Q10213). Activity relative to SEQ ID NO: 32 (Activity FIOP) was calculated as the RNA produced by variant over the RNA produced by SEQ ID NO: 32. The result is shown in Table 7.1.

TABLE 7.1
Activities of Variants Relative to SEQ ID NO: 32

| | | | FIOP Product |
|---|---|---|---|
| SEQ ID | | | Relative to |
| NO: | Amino Acid Differences | Amino Acid Differences | SEQ ID NO: |
| (nt/aa) | (Relative to SEQ ID NO: 32) | (Relative to SEQ ID NO: 2) | 32 |
| 41/42 | L514S | N138R/A311G/K336S/K340W/A388K/V401R/ | ++ |
| | | Y404L/L514S | |
| 43/44 | R38G/L514S | R38G/N138R/A311G/K336S/K340W/A388K/ | + |
| | | V401R/Y404L/L514S | |
| 45/46 | R38G/R394K/L514S | R38G/N138R/A311G/K336S/K340W/A388K/ | + |
| | | R394K/V401R/Y404L/L514S | |
| 47/48 | R38G/R394K/L514S/ | R38G/N138R/A311G/K336S/K340W/A388K/ | + |
| | W664P | R394K/V401R/Y404L/L514S/W664P | |
| 49/50 | R394K/L514S/G875C | N138R/A311G/K336S/K340W/A388K/R394K/ | + |
| | | V401R/Y404L/L514S/G875C | |
| 51/52 | R394K/L514S | N138R/A311G/K336S/K340W/A388K/R394K/ | + |
| | | V401R/Y404L/L514S | |
| 53/54 | R38G/I124F/R394K/ | R38G/I124F/N138R/A311G/K336S/K340W/ | + |
| | L514I | A388K/R394K/V401R/Y404L/L514I | |
| 55/56 | K171E/N878M | N138R/K171E/A311G/K336S/K340W/A388K/ | +++ |
| | | V401R/Y404L/N878M | |
| 57/58 | K170Q | N138R/K170Q/A311G/K336S/K340W/A388K/ | +++ |
| | | V401R/Y404L | |
| 59/60 | V173Y | N138R/V173Y/A311G/K336S/K340W/A388K/ | +++ |
| | | V401R/Y404L | |
| 61/62 | N172V | N138R/N172V/A311G/K336S/K340W/A388K/ | +++ |
| | | V401R/Y404L | |
| 63/64 | V173L | N138R/V173L/A311G/K336S/K340W/A388K/ | ++ |
| | | V401R/Y404L | |
| 65/66 | N172E | N138R/N172E/A311G/K336S/K340W/A388K/ | ++ |
| | | V401R/Y404L | |
| 67/68 | K170S/A629D | N138R/K170S/A311G/K336S/K340W/A388K/ | ++ |
| | | V401R/Y404L/A629D | |
| 69/70 | K171F | N138R/K171F/A311G/K336S/K340W/A388K/ | ++ |
| | | V401R/Y404L | |
| 71/72 | H168V | N138R/H168V/A311G/K336S/K340W/A388K/ | ++ |
| | | V401R/Y404L | |
| 73/74 | N172K | N138R/N172K/A311G/K336S/K340W/A388K/ | ++ |
| | | V401R/Y404L | |
| 75/76 | A166R | N138R/A166R/A311G/K336S/K340W/A388K/ | ++ |
| | | V401R/Y404L | |
| 77/78 | H168K | N138R/H168K/A311G/K336S/K340W/A388K/ | ++ |
| | | V401R/Y404L | |
| 79/80 | A166V/S272N/M274L/ | N138R/A166V/S272N/M274L/F275Y/A311G/ | ++ |
| | F275Y | K336S/K340W/A388K/V401R/Y404L | |
| 81/82 | K170R | N138R/K170R/A311G/K336S/K340W/A388K/ | ++ |
| | | V401R/Y404L | |
| 83/84 | F169L | N138R/F169L/A311G/K336S/K340W/A388K/ | ++ |
| | | V401R/Y404L | |
| 85/86 | A207S | N138R/A207S/A311G/K336S/K340W/A388K/ | ++ |
| | | V401R/Y404L | |
| 87/88 | F169G | N138R/F169G/A311G/K336S/K340W/A388K/ | + |
| | | V401R/Y404L | |
| 89/90 | H168L/I217P/H218Q | N138R/H168L/I217P/H218Q/A311G/K336S/ | + |
| | | K340W/A388K/V401R/Y404L | |
| 91/92 | H168W | N138R/H168W/A311G/K336S/K340W/A388K/ | + |
| | | V401R/Y404L | |
| 93/94 | N172R | N138R/N172R/A311G/K336S/K340W/A388K/ | + |
| | | V401R/Y404L | |
| 95/96 | A166D | N138R/A166D/A311G/K336S/K340W/A388K/ | + |
| | | V401R/Y404L | |
| 97/98 | K171L | N138R/K171L/A311G/K336S/K340W/A388K/ | + |
| | | V401R/Y404L | |
| 99/100 | K171Y/H530N | N138R/K171Y/A311G/K336S/K340W/A388K/ | + |
| | | V401R/Y404L/H530N | |
| 101/102 | N172A | N138R/N172A/A311G/K336S/K340W/A388K/ | + |
| | | V401R/Y404L | |
| 103/104 | V173H | N138R/V173H/A311G/K336S/K340W/A388K/ | + |
| | | V401R/Y404L | |
| 105/106 | T382R | N138R/A311G/K336S/K340W/T382R/A388K/ | + |
| | | V401R/Y404L | |
| 107/108 | D773A | N138R/A311G/K336S/K340W/A388K/V401R/ | + |
| | | Y404L/D773A | |
| 109/110 | H168R | N138R/H168R/A311G/K336S/K340W/A388K/ | + |
| | | V401R/Y404L | |
| 111/112 | K670R | N138R/A311G/K336S/K340W/A388K/V401R/ | + |
| | | Y404L/K670R | |
| 113/114 | H168T | N138R/H168T/A311G/K336S/K340W/A388K/ | + |
| | | V401R/Y404L | |
| 115/116 | N172G | N138R/N172G/A311G/K336S/K340W/A388K/ | + |
| | | V401R/Y404L | |
| 117/118 | E379A | N138R/A311G/K336S/K340W/E379A/A388K/ | + |
| | | V401R/Y404L | |
| 119/120 | Y392M | N138R/A311G/K336S/K340W/A388K/Y392M/ | + |
| | | V401R/Y404L | |
| 121/122 | K419R | N138R/A311G/K336S/K340W/A388K/V401R/ | + |
| | | Y404L/K419R | |
| 123/124 | Y392R | N138R/A311G/K336S/K340W/A388K/Y392R/ | + |
| | | V401R/Y404L | |
| 125/126 | Y392A | N138R/A311G/K336S/K340W/A388K/Y392A/ | + |
| | | V401R/Y404L | |
| 127/128 | R57G | R57G/N138R/A311G/K336S/K340W/A388K/ | + |
| | | V401R/Y404L | |
| 129/130 | H168S | N138R/H168S/A311G/K336S/K340W/A388K/ | + |
| | | V401R/Y404L | |
| 131/132 | L164W | N138R/L164W/A311G/K336S/K340W/A388K/ | + |
| | | V401R/Y404L | |
| 133/134 | K670Q | N138R/A311G/K336S/K340W/A388K/V401R/ | + |
| | | Y404L/K670Q | |
| 135/136 | G810K | N138R/A311G/K336S/K340W/A388K/V401R/ | + |
| | | Y404L/G810K | |
| 137/138 | T382G | N138R/A311G/K336S/K340W/T382G/A388K/ | + |
| | | V401R/Y404L | |
| 139/140 | E659R | N138R/A311G/K336S/K340W/A388K/V401R/ | + |
| | | Y404L/E659R | |
| 141/142 | G54H | G54H/N138R/A311G/K336S/K340W/A388K/ | + |
| | | V401R/Y404L | |
| 143/144 | K419S | N138R/A311G/K336S/K340W/A388K/V401R/ | + |
| | | Y404L/K419S | |
| 145/146 | N172E/V173Y/L514S/ | N138R/N172E/V173Y/A311G/K336S/K340W/ | +++ |
| | E659R/D660H | A388K/V401R/Y404L/L514S/E659R/D660H | |
| 147/148 | K170Q/K171E/N172E/ | N138R/K170Q/K171E/N172E/A311G/K336S/ | +++ |
| | L514S/E659R | K340W/A388K/V401R/Y404L/L514S/E659R | |
| 149/150 | V173Y/L514S/E659R/ | N138R/V173Y/A311G/K336S/K340W/A388K/ | +++ |
| | D660H | V401R/Y404L/L514S/E659R/D660H | |
| 151/152 | V173Y/L514S/E659R/ | N138R/V173Y/A311G/K336S/K340W/A388K/ | +++ |
| | G810K | V401R/Y404L/L514S/E659R/G810K | |
| 153/154 | K170Q/W340K/L514S/ | N138R/K170Q/A311G/K336S/A388K/V401R/ | +++ |
| | E659R/D660H/G810K | Y404L/L514S/E659R/D660H/G810K | |
| 155/156 | K170Q/K171E/V173Y/ | N138R/K170Q/K171E/V173Y/A311G/A388K/ | +++ |
| | S336K/W340K/L514S/ | V401R/Y404L/L514S/E659R/D660H | |
| | E659R/D660H | | |
| 157/158 | R57G/K171E/V173Y/ | R57G/N138R/K171E/V173Y/A311G/K336S/K340W/ | +++ |
| | L514S/E659R/D660H/ | A388K/V401R/Y404L/L514S/E659R/D660H/ | |
| | G810K | G810K | |
| 159/160 | K170Q/V173Y/L514S/ | N138R/K170Q/V173Y/A311G/K336S/K340W/A388K/ | +++ |
| | E659R/D660H/G810K | V401R/Y404L/L514S/E659R/D660H/G810K | |
| 161/162 | R57G/K171E/N172K/S336K/ | R57G/N138R/K171E/N172K/A311G/A388K/V401R/ | +++ |
| | W340K/L514S/E659R | Y404L/L514S/E659R | |
| 163/164 | V173Y/L514S | N138R/V173Y/A311G/K336S/K340W/A388K/V401R/ | +++ |
| | | Y404L/L514S | |
| 165/166 | K171E/N172E/V173Y/ | N138R/K171E/N172E/V173Y/A311G/K336S/K340W/ | +++ |
| | L514S/E659R/D660H | A388K/V401R/Y404L/L514S/E659R/D660H | |
| 167/168 | R57G/K170Q/K171E/ | R57G/N138R/K170Q/K171E/V173Y/A311G/K336S/ | ++ |
| | V173Y/L514S/E659R/ | K340W/A388K/V401R/Y404L/L514S/E659R/D660H/ | |
| | D660H/G810K | G810K | |
| 169/170 | R57G/V173Y/L514S | R57G/N138R/V173Y/A311G/K336S/K340W/A388K/ | ++ |
| | | V401R/Y404L/L514S | |
| 171/172 | N172K/V173D/L514S/ | N138R/N172K/V173D/A311G/K336S/K340W/A388K/ | ++ |
| | A857V | V401R/Y404L/L514S/A857V | |
| 173/174 | R57G/V173Y/W340K/ | R57G/N138R/V173Y/A311G/K336S/A388K/V401R/ | ++ |
| | L514S | Y404L/L514S | |
| 175/176 | K170Q/K171E/V173Y/ | N138R/K170Q/K171E/V173Y/A311G/K340W/A388K/ | ++ |
| | S336K/L514S | V401R/Y404L/L514S | |
| 177/178 | K171E/L514S | N138R/K171E/A311G/K336S/K340W/A388K/V401R/ | ++ |
| | | Y404L/L514S | |
| 179/180 | R57G/K170Q/V173Y/ | R57G/N138R/K170Q/V173Y/A311G/K340W/A388K/ | ++ |
| | S336K/L514S | V401R/Y404L/L514S | |
| 181/182 | K170Q/S336K | N138R/K170Q/A311G/K340W/A388K/V401R/Y404L | ++ |
| 183/184 | V173Y/L514S/E659R | N138R/V173Y/A311G/K336S/K340W/A388K/V401R/ | ++ |
| | | Y404L/L514S/E659R | |
| 185/186 | R57G/L514S | R57G/N138R/A311G/K336S/K340W/A388K/V401R/ | + |
| | | Y404L/L514S | |
| 187/188 | V173Y/G810K | N138R/V173Y/A311G/K336S/K340W/A388K/V401R/ | + |
| | | Y404L/G810K | |

Levels of increased activity were determined relative to the reference polypeptide of SEQ ID NO: 32 and defined as follows: ″+″ 1.04 to 2.30 (first 50%), ″++″ >2.30 (next 30%), ″+++″ >5.31 (top 20%)

### Example 8

### Improvements Over RNA Polymerase of SEQ ID NO: 44

[0426] SEQ ID NO: 44 was selected as the parent enzyme in the in vitro transcription (IVT) assay. Libraries of engineered genes were produced using known techniques (e.g., saturation mutagenesis, recombination of previously identified beneficial mutations). The polypeptides encoded by each gene were produced in HTP as described in Example 2 and purified as described in Example 3. Each variant was diluted 4-fold in RNase-free water and screened in a 1 μL reaction that comprised 0.05 μg/μL 8 kb-DNA template, 40 mM Tris-HCl pH 8.0, 30 mM magnesium acetate, 7.5 mM ATP, 7.5 mM GTP, 7.5 mM CTP, 7.5 mM UTP, 1 U/μL Ribolock RNase Inhibitor (Thermo Scientific, Catalog #E00382), and 0.002 U/μL Pyrophosphatase (Thermo Scientific, Catalog #EF0221). The reactions were initiated by adding 150 nL of the HTP purified variants, incubated in Bio-Rad Hard-Shell® 96-Well PCR plates at 25° C. for 2 h and quenched with 125 nL of 0.5 M EDTA. Quenched mixtures were diluted 100-fold with RNase-free water, and RNA concentrations were measure by using the Quant-iT™ RNA Assay Kits—Broad Range (Thermo Fisher, Catalog #Q10213). Activity relative to SEQ ID NO: 44 (Activity FIOP) was calculated as the RNA produced by variant over the RNA produced by SEQ ID NO: 44. The result is shown in Table 8.1.

TABLE 8.1
Activities of Variants Relative to SEQ ID NO: 44

| | | | FIOP Product |
|---|---|---|---|
| SEQ ID | | | Relative to |
| NO: | Amino Acid Differences | Amino Acid Differences | SEQ ID NO: |
| (nt/aa) | (Relative to SEQ ID NO: 44) | (Relative to SEQ ID NO: 2) | 44 |
| 189/190 | S336K | R38G/N138R/A311G/K340W/A388K/ | + |
| | | V401R/Y404L/L514S | |
| 191/192 | A143V/S336K/W340K/E782V | R38G/N138R/A143V/A311G/A388K/ | + |
| | | V401R/Y404L/L514S/E782V | |
| 193/194 | A143V/S336K/W340K/R357E/ | R38G/N138R/A143V/A311G/R357E/ | + |
| | S514L | A388K/V401R/Y404L | |

Levels of increased activity were determined relative to the reference polypeptide of SEQ ID NO: 44 and defined as follows: ″+″ from 1.60 to 2.08

### Example 9

### Improvements Over RNA Polymerase of SEQ ID NO: 156

[0427] SEQ ID NO: 156 was selected as the parent enzyme in the in vitro transcription (IV) assay. Libraries of engineered genes were produced using known techniques (e.g., saturation mutagenesis, recombination of previously identified beneficial mutations). The polypeptides encoded by each gene were produced in HIP as described in Example 2 and purified as described in Example 3. Each variant was diluted 4-fold in RNase-free water and screened in a 1 μL reaction that comprised 0.05 μg/μL 8 kb-DNA template, 40 mM Tris-HCl pH 8.0, 42 mM magnesium acetate, 10 mM ATP, 10 mM GTP, 10 mM CTP, 10 mM UTP, 1 U/μL Ribolock RNase Inhibitor (Thermo Scientific, Catalog #E00382), and 0.002 U/μL Pyrophosphatase (Thermo Scientific, Catalog #EF0221). The reactions were initiated by adding 150 nL of the HIP purified variants, incubated in Bio-Rad Hard-Shell® 96-Well PCR plates at 25° C. for 2 h and quenched with 125 nL of 0.5 M EDTA. Quenched mixtures were diluted 100-fold with RNase-free water, and RNA concentrations were measure by using the Quant-iT™ RNA Assay Kits—Broad Range (Thermo Fisher, Catalog #Q10213). Activity relative to SEQ ID NO: 156 (Activity FIOP) was calculated as the RNA produced by variant over the RNA produced by SEQ ID NO: 156. The result is shown in Table 9.1.

TABLE 9.1
Activities of Variants Relative to SEQ ID NO: 156

| | | | FIOP Product |
|---|---|---|---|
| SEQ ID | | | Relative to |
| NO: | Amino Acid Differences | Amino Acid Differences | SEQ ID NO: |
| (nt/aa) | (Relative to SEQ ID NO: 156) | (Relative to SEQ ID NO: 2) | 156 |
| 195/196 | A207S | N138R/V173Y/A207S/A311G/K336S/K340W/ | +++ |
| | | A388K/V401R/Y404L/L514S/E659R/D660H | |
| 197/198 | K419R | N138R/V173Y/A311G/K336S/K340W/A388K/ | +++ |
| | | V401R/Y404L/K419R/L514S/E659R/D660H | |
| 199/200 | A207S/S336K/W340K | N138R/V173Y/A207S/A311G/A388K/V401R/ | +++ |
| | | Y404L/L514S/E659R/D660H | |
| 201/202 | A166R/F169L | N138R/A166R/F169L/V173Y/A311G/K336S/ | ++ |
| | | K340W/A388K/V401R/Y404L/L514S/E659R/ | |
| | | D660H | |
| 203/204 | A207S/K670R | N138R/V173Y/A207S/A311G/K336S/K340W/ | ++ |
| | | A388K/V401R/Y404L/L514S/E659R/D660H/ | |
| | | K670R | |
| 205/206 | A166R/S336K/W340K | N138R/A166R/V173Y/A311G/A388K/V401R/ | ++ |
| | | Y404L/L514S/E659R/D660H | |
| 207/208 | A207S/K419R/K670R | N138R/V173Y/A207S/A311G/K336S/K340W/ | ++ |
| | | A388K/V401R/Y404L/K419R/L514S/E659R/ | |
| | | D660H/K670R | |
| 209/210 | A207S/S336K/W340K/ | N138R/V173Y/A207S/A311G/T382G/A388K/ | ++ |
| | T382G/K419R/K670R | V401R/Y404L/K419R/L514S/E659R/D660H/ | |
| | | K670R | |
| 211/212 | A207S/T382G | N138R/V173Y/A207S/A311G/K336S/K340W/ | ++ |
| | | T382G/A388K/V401R/Y404L/L514S/E659R/ | |
| | | D660H | |
| 213/214 | K670R | N138R/V173Y/A311G/K336S/K340W/A388K/ | + |
| | | V401R/Y404L/L514S/E659R/D660H/K670R | |
| 215/216 | S336K/K670R | N138R/V173Y/A311G/K340W/A388K/V401R/ | + |
| | | Y404L/L514S/E659R/D660H/K670R | |
| 217/218 | W340K/K670R | N138R/V173Y/A311G/K336S/A388K/V401R/ | + |
| | | Y404L/L514S/E659R/D660H/K670R | |
| 219/220 | T382G | N138R/V173Y/A311G/K336S/K340W/T382G/ | + |
| | | A388K/V401R/Y404L/L514S/E659R/D660H | |
| 221/222 | K127G/V141A/A207S/ | K127G/N138R/V141A/V173Y/A207S/A311G/ | + |
| | S336K/T382G/K670R | K340W/T382G/A388K/V401R/Y404L/L514S/ | |
| | | E659R/D660H/K670R | |
| 223/224 | A207S/S336K/T382G/ | N138R/V173Y/A207S/A311G/K340W/T382G/ | + |
| | K419R/K670R | A388K/V401R/Y404L/K419R/L514S/E659R/ | |
| | | D660H/K670R | |
| 225/226 | K419R/K670R | N138R/V173Y/A311G/K336S/K340W/A388K/ | + |
| | | V401R/Y404L/K419R/L514S/E659R/D660H/ | |
| | | K670R | |
| 227/228 | A166R/H168V/A207S/S336K/ | N138R/A166R/H168V/V173Y/A207S/A311G/ | + |
| | W340K/K419R/K670R | A388K/V401R/Y404L/K419R/L514S/E659R/ | |
| | | D660H/K670R | |
| 229/230 | A166V/W340K | N138R/A166V/V173Y/A311G/K336S/A388K/ | + |
| | | V401R/Y404L/L514S/E659R/D660H | |
| 231/232 | A207S/S336K/W340K/ | N138R/V173Y/A207S/A311G/A388K/V401R/ | + |
| | K670R | Y404L/L514S/E659R/D660H/K670R | |

Levels of increased activity were determined relative to the reference polypeptide of SEQ ID NO: 156 and defined as follows: ″+″ 1.04 to 1.26 (first 50%), ″++″ >1.26 (next 30%), ″+++″ >1.90 (top 20%)

### Example 10

### Improvements Over RNA Polymerase of SEQ ID NO: 156: Thermostability

[0428] SEQ ID NO: 156 was selected as the parent enzyme in the in vitro transcription (IVT) assay. Libraries of engineered genes were produced using known techniques (e.g., saturation mutagenesis, recombination of previously identified beneficial mutations). The polypeptides encoded by each gene were produced in HTP as described in Example 2 and purified as described in Example 3. Each variant was diluted 4-fold in RNase-free water, preincubated at 33° C. for 30 min, and screened in a 1 μL reaction that comprised 0.05 μg/μL 8 kb-DNA template, 40 mM Tris-HCl pH 8.0, 30 mM magnesium acetate, 7.5 mM ATP, 7.5 mM GTP, 7.5 mM CTP, 7.5 mM UTP, 1 U/μL Ribolock RNase Inhibitor (Thermo Scientific, Catalog #E00382), and 0.002 U/μL Pyrophosphatase (Thermo Scientific, Catalog #EF0221). The reactions were initiated by adding 150 nL of the HTP purified variants, in Bio-Rad Hard-Shell® 96-Well PCR plates at 25° C. for 2 h and quenched with 125 nL of 0.5 M EDTA. Quenched mixtures were diluted 100-fold with RNase-free water, and RNA concentrations were measure by using the Quant-iT™ RNA Assay Kits—Broad Range (Thermo Fisher, Catalog #Q10213). Activity relative to SEQ ID NO: 156 (Activity FIOP) was calculated as the RNA produced by variant over the RNA produced by SEQ ID NO: 156, which was smaller than 1 and therefore rounded up to 1. The result is shown in Table 10.1.

TABLE 10.1
Activities of Variants Relative to SEQ ID NO: 156 after 33° C. Heat Challenge for 30 min

| | | | FIOP Product |
|---|---|---|---|
| SEQ ID | | | Relative to |
| NO: | Amino Acid Differences | Amino Acid Differences | SEQ ID NO: |
| (nt/aa) | (Relative to SEQ ID NO: 156) | (Relative to SEQ ID NO: 2) | 156 |
| 233/234 | R38G/S437P/H779R | R38G/N138R/V173Y/A311G/K336S/K340W/A388K/ | +++ |
| | | V401R/Y404L/S437P/L514S/E659R/D660H/ | |
| | | H779R | |
| 235/236 | R38G/S437P | R38G/N138R/V173Y/A311G/K336S/K340W/A388K/ | +++ |
| | | V401R/Y404L/S437P/L514S/E659R/D660H | |
| 237/238 | R38G | R38G/N138R/V173Y/A311G/K336S/K340W/A388K/ | +++ |
| | | V401R/Y404L/L514S/E659R/D660H | |
| 239/240 | R38G/A207S/S437P/H779R | R38G/N138R/V173Y/A207S/A311G/K336S/K340W/ | ++ |
| | | A388K/V401R/Y404L/S437P/L514S/E659R/D660H/ | |
| | | H779R | |
| 241/242 | C517R/H779R | N138R/V173Y/A311G/K336S/K340W/A388K/V401R/ | ++ |
| | | Y404L/L514S/C517R/E659R/D660H/H779R | |
| 243/244 | R38G/S437P/G527E/W664K | R38G/N138R/V173Y/A311G/K336S/K340W/A388K/ | ++ |
| | | V401R/Y404L/S437P/L514S/G527E/E659R/D660H/ | |
| | | W664K | |
| 245/246 | R38G/A207S/E379S/S437P | R38G/N138R/V173Y/A207S/A311G/K336S/K340W/ | ++ |
| | | E379S/A388K/V401R/Y404L/S437P/L514S/E659R/ | |
| | | D660H | |
| 247/248 | W664K/K670R/H779R | N138R/V173Y/A311G/K336S/K340W/A388K/V401R/ | + |
| | | Y404L/L514S/E659R/D660H/W664K/K670R/ | |
| | | H779R | |
| 249/250 | R38G/H779R | R38G/N138R/V173Y/A311G/K336S/K340W/A388K/ | + |
| | | V401R/Y404L/L514S/E659R/D660H/H779R | |
| 251/252 | R38G/S437P/C517R | R38G/N138R/V173Y/A311G/K336S/K340W/A38K/8 | + |
| | | V401R/Y404L/S437P/L514S/C517R/E659R/D660H | |
| 253/254 | S437P/H779R | N138R/V173Y/A311G/K336S/K340W/A388K/V401R/ | + |
| | | Y404L/S437P/L514S/E659R/D660H/H779R | |
| 255/256 | R38G/S437P/E607Y | R38G/N138R/V173Y/A311G/K336S/K340W/A388K/ | + |
| | | V401R/Y404L/S437P/L514S/E607Y/E659R/D660H | |
| 257/258 | R38G/E379S/H779R | R38G/N138R/V173Y/A311G/K336S/K340W/E379S/ | + |
| | | A388K/V401R/Y404L/L514S/E659R/D660H/H79R7 | |
| 259/260 | C517R/K670R/H779R | N138R/V173Y/A311G/K336S/K340W/A388K/V401R/ | + |
| | | Y404L/L514S/C517R/E659R/D660H/K670R/H779R | |

Levels of increased activity after preincubation at 33° C. for 30 min were determined relative to the reference polypeptide of SEQ ID NO: 156 and defined as follows: ″+″ 1.00 to 1.33 (first 50%), ″++″ >1.33 (next 30%), ″+++″ >1.71 (top 20%)

### Example 11

### Improvements Over RNA Polymerase of SEQ ID NO: 234

[0429] SEQ ID NO: 234 was selected as the parent enzyme in the in vitro transcription (IV) assay. Libraries of engineered genes were produced using known techniques (e.g., saturation mutagenesis, recombination of previously identified beneficial mutations). The polypeptides encoded by each gene were produced in HIP as described in Example 2 and purified as described in Example 3. Each variant was diluted 4-fold in RNase-free water and screened in a 1 μL reaction that comprised 0.05 μg/μL 8 kb-DNA template, 40 mM Tris-HCl pH 8.0, 42 mM magnesium acetate, 10 mM ATP, 10 mM GTP, 10 mM CTP, 10 mM UTP, 1 U/μL Ribolock RNase Inhibitor (Thermo Scientific, Catalog #E00382), and 0.002 U/μL Pyrophosphatase (Thermo Scientific, Catalog #EF0221). The reactions were initiated by adding 150 nL of the HIP purified variants, incubated in Bio-Rad Hard-Shell® 96-Well PCR plates at 25° C. for 2 h and quenched with 125 nL of 0.5 M EDTA. Quenched mixtures were diluted 100-fold with RNase-free water, and RNA concentrations were measure by using the Quant-iT™ RNA Assay Kits—Broad Range (Thermo Fisher, Catalog #Q10213). Activity relative to SEQ ID NO: 234 (Activity FIOP) was calculated as the RNA produced by variant over the RNA produced by SEQ ID NO: 234. The result is shown in Table 11.1.

TABLE 11.1
Activities of Variants Relative to SEQ ID NO: 234

| | Amino Acid | | FIOP Product |
|---|---|---|---|
| SEQ ID | Differences | | Relative to |
| NO: | (Relative to | Amino Acid Differences | SEQ ID NO: |
| (nt/aa) | SEQ ID NO: 234) | (Relative to SEQ ID NO: 2) | 234 |
| 261/262 | K720A | R38G/N138R/V173Y/A311G/K336S/K340W/A388K/ | +++ |
| | | V401R/Y404L/S437P/L514S/E659R/D660H/K720A/ | |
| | | H779R | |
| 263/264 | D196C | R38G/N138R/V173Y/D196C/A311G/K336S/K340W/ | +++ |
| | | A388K/V401R/Y404L/S437P/L514S/E659R/D660H/ | |
| | | H779R | |
| 265/266 | T609W | R38G/N138R/V173Y/A311G/K336S/K340W/A388K/ | +++ |
| | | V401R/Y404L/S437P/L514S/T609W/E659R/D660H/ | |
| | | H779R | |
| 267/268 | D196V | R38G/N138R/V173Y/D196V/A311G/K336S/K340W/ | +++ |
| | | A388K/V401R/Y404L/S437P/L514S/E659R/D660H/ | |
| | | H779R | |
| 269/270 | Q246V | R38G/N138R/V173Y/Q246V/A311G/K336S/K340W/ | +++ |
| | | A388K/V401R/Y404L/S437P/L514S/E659R/D660H/ | |
| | | H779R | |
| 271/272 | Y185L | R38G/N138R/V173Y/Y185L/A311G/K336S/K340W/ | +++ |
| | | A388K/V401R/Y404L/S437P/L514S/E659R/D660H/ | |
| | | H779R | |
| 273/274 | I594G | R38G/N138R/V173Y/A311G/K336S/K340W/A388K/ | +++ |
| | | V401R/Y404L/S437P/L514S/I594G/E659R/D660H/ | |
| | | H779R | |
| 275/276 | H212Y | R38G/N138R/V173Y/H212Y/A311G/K336S/K340W/ | +++ |
| | | A388K/V401R/Y404L/S437P/L514S/E659R/D660H/ | |
| | | H779R | |
| 277/278 | E494G | R38G/N138R/V173Y/A311G/K336S/K340W/A388K/ | +++ |
| | | V401R/Y404L/S437P/E494G/L514S/E659R/D660H/ | |
| | | H779R | |
| 279/280 | D196A | R38G/N138R/V173Y/D196A/A311G/K336S/K340W/ | +++ |
| | | A388K/V401R/Y404L/S437P/L514S/E659R/D660H/ | |
| | | H779R | |
| 281/282 | H212R | R38G/N138R/V173Y/H212R/A311G/K336S/K340W/ | +++ |
| | | A388K/V401R/Y404L/S437P/L514S/E659R/D660H/ | |
| | | H779R | |
| 283/284 | D375F | R38G/N138R/V173Y/A311G/K336S/K340W/D375F/ | +++ |
| | | A388K/V401R/Y404L/S437P/L514S/E659R/D660H/ | |
| | | H779R | |
| 285/286 | K721T | R38G/N138R/V173Y/A311G/K336S/K340W/A388K/ | ++ |
| | | V401R/Y404L/S437P/L514S/E659R/D660H/K721T/ | |
| | | H779R | |
| 287/288 | K721A | R38G/N138R/V173Y/A311G/K336S/K340W/A388K/ | ++ |
| | | V401R/Y404L/S437P/L514S/E659R/D660H/K721A/ | |
| | | H779R | |
| 289/290 | A72R | R38G/A72R/N138R/V173Y/A311G/K336S/K340W/ | ++ |
| | | A388K/V401R/Y404L/S437P/L514S/E659R/D660H/ | |
| | | H779R | |
| 291/292 | Y185I | R38G/N138R/V173Y/Y185I/A311G/K336S/K340W/ | ++ |
| | | A388K/V401R/Y404L/S437P/L514S/E659R/D660H/ | |
| | | H779R | |
| 293/294 | K721S | R38G/N138R/V173Y/A311G/K336S/K340W/A388K/ | ++ |
| | | V401R/Y404L/S437P/L514S/E659R/D660H/K721S/ | |
| | | H779R | |
| 295/296 | K867Q | R38G/N138R/V173Y/A311G/K336S/K340W/A388K/ | ++ |
| | | V401R/Y404L/S437P/L514S/E659R/D660H/H779R/ | |
| | | K867Q | |
| 297/298 | K721Y | R38G/N138R/V173Y/A311G/K336S/K340W/A388K/ | ++ |
| | | V401R/Y404L/S437P/L514S/E659R/D660H/K721Y/ | |
| | | H779R | |
| 299/300 | R160F | R38G/N138R/R160F/V173Y/A311G/K336S/K340W/ | ++ |
| | | A388K/V401R/Y404L/S437P/L514S/E659R/D660H/ | |
| | | H779R | |
| 301/302 | K718F | R38G/N138R/V173Y/A311G/K336S/K340W/A388K/ | ++ |
| | | V401R/Y404L/S437P/L514S/E659R/D660H/K718F/ | |
| | | H779R | |
| 303/304 | T609F | R38G/N138R/V173Y/A311G/K336S/K340W/A388K/ | + |
| | | V401R/Y404L/S437P/L514S/T609F/E659R/D660H/ | |
| | | H779R | |
| 305/306 | K720S | R38G/N138R/V173Y/A311G/K336S/K340W/A388K/ | + |
| | | V401R/Y404L/S437P/L514S/E659R/D660H/K720S/ | |
| | | H779R | |
| 307/308 | K187L | R38G/N138R/V173Y/K187L/A311G/K336S/K340W/ | + |
| | | A388K/V401R/Y404L/S437P/L514S/E659R/D660H/ | |
| | | H779R | |
| 309/310 | K718V | R38G/N138R/V173Y/A311G/K336S/K340W/A388K/ | + |
| | | V401R/Y404L/S437P/L514S/E659R/D660H/K718VH | |
| | | H779R | |
| 311/312 | K170L/Y173V | R38G/N138R/K170L/A311G/K336S/K340W/A388K/ | + |
| | | V401R/Y404L/S437P/L514S/E659R/D660H/H779R | |
| 313/314 | T609E | R38G/N138R/V173Y/A311G/K336S/K340W/A388K/ | + |
| | | V401R/Y404L/S437P/L514S/T609E/E659R/D660H/ | |
| | | H779R | |
| 315/316 | K718S | R38G/N138R/V173Y/A311G/K336S/K340W/A388K/ | + |
| | | V401R/Y404L/S437P/L514S/E659R/D660H/K718S/ | |
| | | H779R | |
| 317/318 | T609C | R38G/N138R/V173Y/A311G/K336S/K340W/A388K/ | + |
| | | V401R/Y404L/S437P/L514S/T609C/E659R/D660H/ | |
| | | H779R | |
| 319/320 | T609P | R38G/N138R/V173Y/A311G/K336S/K340W/A388K/ | + |
| | | V401R/Y404L/S437P/L514S/T609P/E659R/D660H/ | |
| | | H779R | |
| 321/322 | K721M | R38G/N138R/V173Y/A311G/K336S/K340W/A388K/ | + |
| | | V401R/Y404L/S437P/L514S/E659R/D660H/K721M/ | |
| | | H779R | |
| 323/324 | K615A | R38G/N138R/V173Y/A311G/K336S/K340W/A388K/ | + |
| | | V401R/Y404L/S437P/L514S/K615A/E659R/D660H/ | |
| | | H779R | |
| 325/326 | K187H | R38G/N138R/V173Y/K187H/A311G/K336S/K340W/ | + |
| | | A388K/V401R/Y404L/S437P/L514S/E659R/D660H/ | |
| | | H779R | |
| 327/328 | D196S | R38G/N138R/V173Y/D196S/A311G/K336S/K340W/ | + |
| | | A388K/V401R/Y404L/S437P/L514S/E659R/D660H/ | |
| | | H779R | |
| 329/330 | K721E | R38G/N138R/V173Y/A311G/K336S/K340W/A388K/ | + |
| | | V401R/Y404L/S437P/L514S/E659R/D660H/K721E/ | |
| | | H779R | |
| 331/332 | K718Y | R38G/N138R/V173Y/A311G/K336S/K340W/A388K/ | + |
| | | V401R/Y404L/S437P/L514S/E659R/D660H/K718Y/ | |
| | | H779R | |
| 333/334 | D137G/R138N | R38G/D137G/V173Y/A311G/K336S/K340W/A388K/ | + |
| | | V401R/Y404L/S437P/L514S/E659R/D660H/H779R | |
| 335/336 | K187G | R38G/N138R/V173Y/K187G/A311G/K336S/K340W/ | + |
| | | A388K/V401R/Y404L/S437P/L514S/E659R/D660H/ | |
| | | H779R | |
| 337/338 | K720G | R38G/N138R/V173Y/A311G/K336S/K340W/A388K/ | + |
| | | V401R/Y404L/S437P/L514S/E659R/D660H/K720G/ | |
| | | H779R | |
| 339/340 | K720P | R38G/N138R/V173Y/A311G/K336S/K340W/A388K/ | + |
| | | V401R/Y404L/S437P/L514S/E659R/D660H/K720P/ | |
| | | H779R | |
| 341/342 | D854T | R38G/N138R/V173Y/A311G/K336S/K340W/A388K/ | + |
| | | V401R/Y404L/S437P/L514S/E659R/D660H/H779R/ | |
| | | D854T | |
| 343/344 | K720I | R38G/N138R/V173Y/A311G/K336S/K340W/A388K/ | + |
| | | V401R/Y404L/S437P/L514S/E659R/D660H/K720I/ | |
| | | H779R | |
| 345/346 | R160L | R38G/N138R/R160L/V173Y/A311G/K336S/K340W/ | + |
| | | A388K/V401R/Y404L/S437P/L514S/E659R/D660H/ | |
| | | H779R | |
| 347/348 | A131T | R38G/A131T/N138R/V173Y/A311G/K336S/K340W/ | + |
| | | A388K/V401R/Y404L/S437P/L514S/E659R/D660H/ | |
| | | H779R | |
| 349/350 | G38R/Y185L/K187H/ | N138R/V173Y/Y185L/K187H/A311G/K336S/K340W/ | ++ |
| | P437S | A388K/V401R/Y404L/L514S/E659R/D660H/H779R | |
| 351/352 | Y185L/K187H | R38G/N138R/V173Y/Y185L/K187H/A311G/K336S/ | ++ |
| | | K340W/A388K/V401R/Y404L/S437P/L514S/E659R/ | |
| | | D660H/H779R | |
| 353/354 | Y185L/K187L | R38G/N138R/V173Y/Y185L/K187L/A311G/K336S/ | ++ |
| | | K340W/A388K/V401R/Y404L/S437P/L514S/E659R/ | |
| | | D660H/H779R | |
| 355/356 | P437S/T609C | R38G/N138R/V173Y/A311G/K336S/K340W/A388K/ | ++ |
| | | V401R/Y404L/L514S/T609C/E659R/D660H/H779R | |
| 357/358 | G38R/T609P | N138R/V173Y/A311G/K336S/K340W/A388K/V401R/ | ++ |
| | | Y404L/S437P/L514S/T609P/E659R/D660H/H779R | |
| 359/360 | G38R/Y185L/K187H/ | N138R/V173Y/Y185L/K187H/A311G/K336S/K340W/ | ++ |
| | P437S/T609C | A388K/V401R/Y404L/L514S/T609C/E659R/D660H/ | |
| | | H779R | |
| 361/362 | P437S/T609P/K720A | R38G/N138R/V173Y/A311G/K336S/K340W/A388K/ | ++ |
| | | V401R/Y404L/L514S/T609P/E659R/D660H/K720A/ | |
| | | H779R | |
| 363/364 | Y185L/K187L/T609P | R38G/N138R/V173Y/Y185L/K187L/A311G/K336S/ | ++ |
| | | K340W/A388K/V401R/Y404L/S437P/L514S/T609P/ | |
| | | E659R/D660H/H779R | |
| 365/366 | Y185L/K187L/P437S | R38G/N138R/V173Y/Y185L/K187L/A311G/K336S/ | ++ |
| | | K340W/A388K/V401R/Y404L/L514S/E659R/D660H/ | |
| | | H779R | |
| 367/368 | Y185L/K187H/P437S | R38G/N138R/V173Y/Y185L/K187H/A311G/K336S/ | + |
| | | K340W/A388K/V401R/Y404L/L514S/E659R/D660H/ | |
| | | H779R | |
| 369/370 | P437S/T609P | R38G/N138R/V173Y/A311G/K336S/K340W/A388K/ | + |
| | | V401R/Y404L/L514S/T609P/E659R/D660H/H779R | |
| 371/372 | P437S/K721S | R38G/N138R/V173Y/A311G/K336S/K340W/A388K/ | + |
| | | V401R/Y404L/L514S/E659R/D660H/K721S/H779R | |
| 373/374 | Y185L/K187H/T609E | R38G/N138R/V173Y/Y185L/K187H/A311G/K336S/ | + |
| | | K340W/A388K/V401R/Y404L/S437P/L514S/T609E/ | |
| | | E659R/D660H/H779R | |
| 375/376 | T609P/K720A | R38G/N138R/V173Y/A311G/K336S/K340W/A388K/ | + |
| | | V401R/Y404L/S437P/L514S/T609P/E659R/D660H/ | |
| | | K720A/H779R | |
| 377/378 | Y185L/K187L/Q246V | R38G/N138R/V173Y/Y185L/K187L/Q246V/A311G/ | + |
| | | K336S/K340W/A388K/V401R/Y404L/S437P/L514S/ | |
| | | 5E69R/D660H/H779R | |
| 379/380 | Y185L/K187H/P437S/ | R38G/N138R/V173Y/Y185L/K187H/A311G/K336S/ | + |
| | T609P/K720A | K340W/A388K/V401R/Y404L/L514S/T609P/E659R/ | |
| | | D660H/K720A/H779R | |

Levels of increased activity were determined relative to the reference polypeptide of SEQ ID NO: 234 and defined as follows: ″+″ 1.92 to 11.20 (first 50%), ″++″ >11.20 (next 30%), ″+++″ >22.95 (top 20%)

### Example 12

### Improvements Over RNA Polymerase of SEQ ID NO: 156

[0430] SEQ ID NO: 156 was selected as the parent enzyme in the in vitro transcription (IVT) assay. SEQ ID NO: 381 and SEQ ID NO: 383 were rationally designed, de novo synthesized, and cloned into the expression vector pCK110900 (See, FIG. 3 of US Pat. Appln. Publn. No. 2006/0195947) operatively linked to the lac promoter under control of the lac1 repressor. The expression vector also contains the P15a origin of replication and the chloramphenicol resistance gene. The resulting plasmids were transformed into E. coli BL21, using standard methods known in the art. The transformants were isolated by subjecting the cells to chloramphenicol selection, as known in the art (See e.g., U.S. Pat. No. 8,383,346 and WO2010/144103). The polypeptides encoded by each gene were generated and purified from the shake flask cultures as described in Example 4. Each variant was assayed in a 1 μL reaction that comprised 0.05 μg/μL 11 kb-DNA template, 40 mM Tris-HCl pH 8.0, 42 mM magnesium acetate, 10 mM ATP, 10 mM GTP, 10 mM CTP, 10 mM UTP, 1 U/μL Ribolock RNase Inhibitor (Thermo Scientific, Catalog #E00382), 0.002 U/μL Pyrophosphatase (Thermo Scientific, Catalog #EF0221), and a final concentration of 20 ng/μL of variants. The IVT reactions were initiated by adding the variants, incubated in Bio-Rad Hard-Shell® 96-Well PCR plates at 25° C. for 2 h, and quenched with 125 nL of 0.5 M EDTA. Quenched mixtures were diluted 100-fold with RNase-free water, and RNA concentrations were measure by using the Quant-iT™ RNA Assay Kits—Broad Range (Thermo Fisher, Catalog #Q10213). Activity relative to SEQ ID NO: 156 (Activity FIOP) was calculated as the RNA produced by variant over the RNA produced by SEQ ID NO: 156. The result is shown in Table 12.1.

TABLE 12.1
Activities of Variants Relative to SEQ ID NO: 156

| | | | FIOP Product |
|---|---|---|---|
| SEQ ID | | | Relative to |
| NO: | Amino Acid Differences | Amino Acid Differences | SEQ ID NO: |
| (nt/aa) | (Relative to SEQ ID NO: 156) | (Relative to SEQ ID NO: 2) | 156 |
| 381/382 | R357E/R394K/W664P | N138R/V173Y/A311G/K336S/K340W/R357E/ | + |
| | | A388K/R394K/V401R/Y404L/L514S/E659R/ | |
| | | D660H/W664P | |
| 383/384 | R138N/G311A/S336K/W340K/ | V173Y/R357E/R394K/V401R/Y404S/L514S/ | + |
| | R357E/K388A/R394K/L404S/ | E659R/D660H/W664P | |
| | W664P | | |

Levels of increased activity were determined relative to the reference polypeptide of SEQ ID NO: 156 and defined as follows: ″+″ from 1.09 to 1.22

### Example 13

### Improvements Over RNA Polymerase of SEQ ID NO: 386

[0431] Plasmid containing SEQ ID NO: 381 was transformed into E. coli W3110 to give SEQ ID NO: 385, which was selected as the parent enzyme in the in vitro transcription (IV) assay. Unlike SEQ ID NO: 381 expressed in E. coli BL21 and rendering functional polypeptides, SEQ ID NO: 385 in E. coli W3110 was not expressed. To achieve soluble and functional expression, libraries of engineered genes were produced using known techniques (e.g., saturation mutagenesis, recombination of previously identified beneficial mutations). The polypeptides encoded by each gene were produced in HTP as described in Example 2 and purified as described in Example 3. Each variant was diluted 4-fold in RNase-free water and screened in a 1 μL reaction that comprised 0.05 μg/μL 11 kb-DNA template, 40 mM Tris-HCl pH 8.0, 42 mM magnesium acetate, 10 mM ATP, 10 mM GTP, 10 mM CTP, 10 mM UTP, 1 U/μL Ribolock RNase Inhibitor (Thermo Scientific, Catalog #E00382), and 0.002 U/μL Pyrophosphatase (Thermo Scientific, Catalog #EF0221). The reactions were initiated by adding 150 nL of the HTP purified variants, incubated in Bio-Rad Hard-Shell® 96-Well PCR plates at 25° C. for 2 h and quenched with 125 nL of 0.5 M EDTA. Quenched mixtures were diluted 100-fold with RNase-free water, and RNA concentrations were measure by using the Quant-iT™ RNA Assay Kits—Broad Range (Thermo Fisher, Catalog #Q10213). As SEQ ID NO: 386 failed to be functionally expressed in E. coli W3110, RNA produced by SEQ ID NO: 386 was much smaller than 1 ng/μL and therefore rounded up to 1 ng/μL. Activity relative to SEQ ID NO: 386 (Activity FIOP) was calculated as the RNA produced by variant over the RNA produced by SEQ ID NO: 386. The result is shown in Table 13.1.

TABLE 13.1
Activities of Variants Relative to SEQ ID: 386

| | | | FIOP Product |
|---|---|---|---|
| SEQ ID | | | Relative to |
| NO: | Amino Acid Differences | Amino Acid Differences | SEQ ID NO: |
| (nt/aa) | (Relative to SEQ ID NO: 386) | (Relative to SEQ ID NO: 2) | 386 |
| 385/386 | — | N138R/V173Y/A311G/K336S/K340W/R357E/A388K/ | — |
| | | R394K/V401R/Y404L/L514S/E659R/D660H/ | |
| | | W664P | |
| 387/388 | K170L/T609P | N138R/K170L/V173Y/A311G/K336S/K340W/ | +++ |
| | | R357E/A388K/R394K/V401R/Y404L/L514S/T609P/ | |
| | | E659R/D660H/W664P | |
| 389/390 | R38G/Y185L/K187L/T609C | R38G/N138R/V173Y/Y185L/K187L/A311G/K336S/ | +++ |
| | | K340W/R357E/A388K/R394K/V401R/Y404L/ | |
| | | L514S/T609C/E659R/D660H/W664P | |
| 391/392 | R38G/Y185L/K187H | R38G/N138R/V173Y/Y185L/K187H/A311G/K336S/ | +++ |
| | | K340W/R357E/A388K/R394K/V401R/Y404L/ | |
| | | L514S/E659R/D660H/W664P | |
| 393/394 | R38G/K170L/Y173V | R38G/N138R/K170L/A311G/K336S/K340W/R357E/ | +++ |
| | | A388K/R394K/V401R/Y404L/L514S/E659R/ | |
| | | D660H/W664P | |
| 395/396 | R38G/Y173V/Y185L/ | R38G/N138R/Y185L/K187L/A311G/K336S/K340W/ | +++ |
| | K187L/K720A | R357E/A388K/R394K/V401R/Y404L/L514S/E659R/ | |
| | | D660H/W664P/K720A | |
| 397/398 | K170L/Y185L/K187H/ | N138R/K170L/V173Y/Y185L/K187H/A311G/K336S/ | +++ |
| | T609C | K340W/R357E/A388K/R394K/V401R/Y404L/L514S/ | |
| | | T609C/E659R/D660H/W664P | |
| 399/400 | T609E | N138R/V173Y/A311G/K336S/K340W/R357E/A388K/ | +++ |
| | | R394K/V401R/Y404L/L514S/T609E/E659R/D660H/ | |
| | | W664P | |
| 401/402 | K170L/Y185L/K187H/ | N138R/K170L/V173Y/Y185L/K187H/A311G/K336S/ | ++ |
| | T609C/K721S | K340W/R357E/A388K/R394K/V401R/Y404L/ | |
| | | L514S/T609C/E659R/D660H/W664P/K721S | |
| 403/404 | R38G/T609E | R38G/N138R/V173Y/A311G/K336S/K340W/R357E/ | ++ |
| | | A388K/R394K/V401R/Y404L/L514S/T609E/E659R/ | |
| | | D660H/W664P | |
| 405/406 | K170L/Y185L/K187L/ | N138R/K170L/V173Y/Y185L/K187L/A311G/K336S/ | ++ |
| | T609E | K340W/R357E/A388K/R394K/V401R/Y404L/L514S/ | |
| | | T609E/E659R/D660H/W664P | |
| 407/408 | R38G/K170L/Q246V/ | R38G/N138R/K170L/V173Y/Q246V/A311G/K336S/ | ++ |
| | T609P | K340W/R357E/A388K/R394K/V401R/Y404L/L514S/ | |
| | | T609P/E659R/D660H/W664P | |
| 409/410 | Y185L/K187H/T609E/ | N138R/V173Y/Y185L/K187H/A311G/K336S/K340W/ | ++ |
| | K718S | R357E/A388K/R394K/V401R/Y404L/L514S/T609E/ | |
| | | E659R/D660H/W664P/K718S | |
| 411/412 | R38G/Y185L/K187L/ | R38G/N138R/V173Y/Y185L/K187L/A311G/K336S/ | ++ |
| | T609W/K718N/K720A | K340W/R357E/A388K/R394K/V401R/Y404L/L514S/ | |
| | | T609W/E659R/D660H/W664P/K718N/K720A | |
| 413/414 | R38G/K170L/Q246V/ | R38G/N138R/K170L/V173Y/Q246V/A311G/K336S/ | ++ |
| | T609C/K718S | K340W/R357E/A388K/R394K/V401R/Y404L/L514S/ | |
| | | T609C/E659R/D660H/W664P/K718S | |
| 415/416 | K720A | N138R/V173Y/A311G/K336S/K340W/R357E/A388K/ | ++ |
| | | R394K/V401R/Y404L/L514S/E659R/D660H/W664P/ | |
| | | K720A | |
| 417/418 | Q246V/T609E | N138R/V173Y/Q246V/A311G/K336S/K340W/R357E/ | ++ |
| | | A388K/R394K/V401R/Y404L/L514S/T609E/E659R/ | |
| | | D660H/W664P | |
| 419/420 | R38G/Y185L/K187L/ | R38G/N138R/V173Y/Y185L/K187L/Q246V/A311G/ | ++ |
| | Q246V/K720A | K336S/K340W/R357E/A388K/R394K/V401R/Y404L/ | |
| | | L514S/E659R/D660H/W664P/K720A | |
| 421/422 | R38G/T609C/K721S | R38G/N138R/V173Y/A311G/K336S/K340W/R357E/ | ++ |
| | | A388K/R394K/V401R/Y404L/L514S/T609C/E659R/ | |
| | | D660H/W664P/K721S | |
| 423/424 | R38G/K721S | R38G/N138R/V173Y/A311G/K336S/K340W/R357E/ | + |
| | | A388K/R394K/V401R/Y404L/L514S/E659R/D660H/ | |
| | | W664P/K721S | |
| 425/426 | R38G/K720A/K721S | R38G/N138R/V173Y/A311G/K336S/K340W/R357E/ | + |
| | | A388K/R394K/V401R/Y404L/L514S/E659R/D660H/ | |
| | | W664P/K720A/K721S | |
| 427/428 | R38G/K170L/T609C/ | R38G/N138R/K170L/V173Y/A311G/K336S/K340W/ | + |
| | K718S/K720A | R357E/A388K/R394K/V401R/Y404L/L514S/T609C/ | |
| | | E659R/D660H/W664P/K718S/K720A | |
| 429/430 | R38G/K718S | R38G/N138R/V173Y/A311G/K336S/K340W/R357E/ | + |
| | | A388K/R394K/V401R/Y404L/L514S/E659R/D660H/ | |
| | | W664P/K718S | |
| 431/432 | R38G/K170L/Q246V/ | R38G/N138R/K170L/V173Y/Q246V/A311G/K336S/ | + |
| | T609P/K718S | K340W/R357E/A388K/R394K/V401R/Y404L/L514S/ | |
| | | T609P/E659R/D660H/W664P/K718S | |
| 433/434 | R38G/Y185L/K187L/ | R38G/N138R/V173Y/Y185L/K187L/A311G/K336S/ | + |
| | T609P/K718S/K721S | K340W/R357E/A388K/R394K/V401R/Y404L/L514S/ | |
| | | T609P/E659R/D660H/W664P/K718S/K721S | |
| 435/436 | Q529R/T609E | N138R/V173Y/A311G/K336S/K340W/R357E/A388K/ | + |
| | | R394K/V401R/Y404L/L514S/Q529R/T609E/E659R/ | |
| | | D660H/W664P | |
| 437/438 | R38G/T609P/K718S | R38G/N138R/V173Y/A311G/K336S/K340W/R357E/ | + |
| | | A388K/R394K/V401R/Y404L/L514S/T609P/E659R/ | |
| | | D660H/W664P/K718S | |
| 439/440 | Y185L/K187L/T609C/ | N138R/V173Y/Y185L/K187L/A311G/K336S/K340W/ | + |
| | K718S/K720A | R357E/A388K/R394K/V401R/Y404L/L514S/T609C/ | |
| | | E659R/D660H/W664P/K718S/K720A | |
| 441/442 | Y185L/K187H/T609C/ | N138R/V173Y/Y185L/K187H/A311G/K336S/K340W/ | + |
| | K718S/K721S | R357E/A388K/R394K/V401R/Y404L/L514S/T609C/ | |
| | | E659R/D660H/W664P/K718S/K721S | |
| 443/444 | R38G/K170L/K718S/ | R38G/N138R/K170L/V173Y/A311G/K336S/K340W/ | + |
| | K720A/K721S | R357E/A388K/R394K/V401R/Y404L/L514S/E659R/ | |
| | | D660H/W664P/K718S/K720A/K721S | |
| 445/446 | K170L/Y185L/K187L/ | N138R/K170L/V173Y/Y185L/K187L/A311G/K336S/ | + |
| | K718S/K720A | K340W/R357E/A388K/R394K/V401R/Y404L/L514S/ | |
| | | E659R/D660H/W664P/K718S/K720A | |
| 447/448 | R38G/Y173V/Y185L/ | R38G/N138R/Y185L/K187L/Q246V/A311G/K336S/ | + |
| | K187L/Q246V/T609E/ | K340W/R357E/A388K/R394K/V401R/Y404L/L514S/ | |
| | K720A | T609E/E659R/D660H/W664P/K720A | |
| 449/450 | T609E/K718S/K720A | N138R/V173Y/A311G/K336S/K340W/R357E/A388K/ | + |
| | | R394K/V401R/Y404L/L514S/T609E/E659R/D660H/ | |
| | | W664P/K718S/K720A | |
| 451/452 | K170L/Y185L/K187H/ | N138R/K170L/V173Y/Y185L/K187H/A311G/K336S/ | + |
| | K718S/K720A/K721S | K340W/R357E/A388K/R394K/V401R/Y404L/L514S/ | |
| | | E659R/D660H/W664P/K718S/K720A/K721S | |
| 453/454 | R38G/K170L/Y173V/ | R38G/N138R/K170L/Q246V/A311G/K336S/K340W/ | + |
| | Q246V/T609E/K718S | R357E/A388K/R394K/V401R/Y404L/L514S/T609E/ | |
| | | E659R/D660H/W664P/K718S | |
| 455/456 | Q246V/K721S | N138R/V173Y/Q246V/A311G/K336S/K340W/R357E/ | + |
| | | A388K/R394K/V401R/Y404L/L514S/E659R/D660H/ | |
| | | W664P/K721S | |
| 457/458 | R38G/K718S/K720A | R38G/N138R/V173Y/A311G/K336S/K340W/R357E/ | + |
| | | A388K/R394K/V401R/Y404L/L514S/E659R/D660H/ | |
| | | W664P/K718S/K720A | |
| 459/460 | R38G/T609E/K718S/ | R38G/N138R/V173Y/A311G/K336S/K340W/R357E/ | + |
| | K720A | A388K/R394K/V401R/Y404L/L514S/T609E/E659R/ | |
| | | D660H/W664P/K718S/K720A | |

Levels of increased activity were determined relative to the reference polypeptide of SEQ ID NO: 386 and defined as follows: ″+″ 4.11 to 10.95 (first 50%), ″++″ >10.95 (next 30%), ″+++″ >34.67 (top 20%)

### Example 14

### Improvements Over RNA Polymerase of SEQ ID NO: 238

[0432] SEQ ID NO: 238 was selected as the parent enzyme in the in vitro transcription (IV) assay. Libraries of engineered genes were produced using known techniques (e.g., saturation mutagenesis, recombination of previously identified beneficial mutations). The polypeptides encoded by each gene were produced in HIP as described in Example 2 and purified as described in Example 3. Each variant was diluted 4-fold in RNase-free water and screened in a 1 μL reaction that comprised 0.05 μg/μL 11 kb-DNA template, 40 mM Tris-HCl pH 8.0, 42 mM magnesium acetate, 10 mM ATP, 10 mM GTP, 10 mM CTP, 10 mM UTP, 1 U/μL Ribolock RNase Inhibitor (Thermo Scientific, Catalog #E00382), and 0.002 U/μL Pyrophosphatase (Thermo Scientific, Catalog #EF0221). The reactions were initiated by adding 150 nL of the HIP purified variants, incubated in Bio-Rad Hard-Shell® 96-Well PCR plates at 25° C. for 2 h and quenched with 125 nL of 0.5 M EDTA. Quenched mixtures were diluted 100-fold with RNase-free water, and RNA concentrations were measure by using the Quant-iT™ RNA Assay Kits—Broad Range (Thermo Fisher, Catalog #Q10213). Activity relative to SEQ ID NO: 238 (Activity FIOP) was calculated as the RNA produced by variant over the RNA produced by SEQ ID NO: 238. The result is shown in Table 14.1.

TABLE 14.1
Activities of Variants Relative to SEQ ID: 238

| | Amino Acid | Amino Acid | |
|---|---|---|---|
| SEQ ID | Differences | Differences | FIOP Product |
| NO: | (Relative to | (Relative to | Relative to SEQ |
| (nt/aa) | SEQ ID NO: 238) | SEQ ID NO: 2) | ID NO: 238 |
| 461/462 | A143N | R38G/N138R/A143N/V173Y/A311G/K336S/ | +++ |
| | | K340W/A388K/V401R/Y404L/L514S/E659R/ | |
| | | D660H | |
| 463/464 | A143Q | R38G/N138R/A143Q/V173Y/A311G/K336S/ | ++ |
| | | K340W/A388K/V401R/Y404L/L514S/E659R/ | |
| | | D660H | |
| 465/466 | A143R | R38G/N138R/A143R/V173Y/A311G/K336S/ | ++ |
| | | K340W/A388K/V401R/Y404L/L514S/E659R/ | |
| | | D660H | |
| 467/468 | K105R | R38G/K105R/N138R/V173Y/A311G/K336S/ | + |
| | | K340W/A388K/V401R/Y404L/L514S/E659R/ | |
| | | D660H | |
| 469/470 | E775R/H779R | R38G/N138R/V173Y/A311G/K336S/K340W/ | + |
| | | A388K/V401R/Y404L/L514S/E659R/D660H/ | |
| | | E775R/H779R | |
| 471/472 | S135K | R38G/S135K/N138R/V173Y/A311G/K336S/ | + |
| | | K340W/A388K/V401R/Y404L/L514S/E659R/ | |
| | | D660H | |
| 473/474 | K100R | R38G/K100R/N138R/V173Y/A311G/K336S/ | + |
| | | K340W/A388K/V401R/Y404L/L514S/E659R/ | |
| | | D660H | |
| 475/476 | E775K/H779R | R38G/N138R/V173Y/A311G/K336S/K340W/ | + |
| | | A388K/V401R/Y404L/L514S/E659R/D660H/ | |
| | | E775K/H779R | |
| 477/478 | Q246K | R38G/N138R/V173Y/Q246K/A311G/K336S/ | + |
| | | K340W/A388K/V401R/Y404L/L514S/E659R/ | |
| | | D660H | |
| 479/480 | H779R/E782R | R38G/N138R/V173Y/A311G/K336S/K340W/ | + |
| | | A388K/V401R/Y404L/L514S/E659R/D660H/ | |
| | | H779R/E782R | |
| 481/482 | P749R | R38G/N138R/V173Y/A311G/K336S/K340W/ | + |
| | | A388K/V401R/Y404L/L514S/E659R/D660H/ | |
| | | P749R | |
| 483/484 | H237L | R38G/N138R/V173Y/H237L/A311G/K336S/ | +++ |
| | | K340W/A388K/V401R/Y404L/L514S/E659R/ | |
| | | D660H | |
| 485/486 | R162V | R38G/N138R/R162V/V173Y/A311G/K336S/ | +++ |
| | | K340W/A388K/V401R/Y404L/L514S/E659R/ | |
| | | D660H | |
| 487/488 | T83K | R38G/T83K/N138R/V173Y/A311G/K336S/ | +++ |
| | | K340W/A388K/V401R/Y404L/L514S/E659R/ | |
| | | D660H | |
| 489/490 | H218T | R38G/N138R/V173Y/H218T/A311G/K336S/ | +++ |
| | | K340W/A388K/V401R/Y404L/L514S/E659R/ | |
| | | D660H | |
| 491/492 | L227V | R38G/N138R/V173Y/L227V/A311G/K336S/ | +++ |
| | | K340W/A388K/V401R/Y404L/L514S/E659R/ | |
| | | D660H | |
| 493/494 | E115L | R38G/E115L/N138R/V173Y/A311G/K336S/ | +++ |
| | | K340W/A388K/V401R/Y404L/L514S/E659R/ | |
| | | D660H | |
| 495/496 | M274G | R38G/N138R/V173Y/M274G/A311G/K336S/ | +++ |
| | | K340W/A388K/V401R/Y404L/L514S/E659R/ | |
| | | D660H | |
| 497/498 | I81C | R38G/I81C/N138R/V173Y/A311G/K336S/ | +++ |
| | | K340W/A388K/V401R/Y404L/L514S/E659R/ | |
| | | D660H | |
| 499/500 | A122I | R38G/A122I/N138R/V173Y/A311G/K336S/ | +++ |
| | | K340W/A388K/V401R/Y404L/L514S/E659R/ | |
| | | D660H | |
| 501/502 | M61Y | R38G/M61Y/N138R/V173Y/A311G/K336S/ | +++ |
| | | K340W/A388K/V401R/Y404L/L514S/E659R/ | |
| | | D660H | |
| 503/504 | A32S | A32S/R38G/N138R/V173Y/A311G/K336S/ | +++ |
| | | K340W/A388K/V401R/Y404L/L514S/E659R/ | |
| | | D660H | |
| 505/506 | T139R | R38G/N138R/T139R/V173Y/A311G/K336S/ | ++ |
| | | K340W/A388K/V401R/Y404L/L514S/E659R/ | |
| | | D660H | |
| 507/508 | A75Y | R38G/A75Y/N138R/V173Y/A311G/K336S/ | ++ |
| | | K340W/A388K/V401R/Y404L/L514S/E659R/ | |
| | | D660H | |
| 509/510 | Q239R | R38G/N138R/V173Y/Q239R/A311G/K336S/ | ++ |
| | | K340W/A388K/V401R/Y404L/L514S/E659R/ | |
| | | D660H | |
| 511/512 | Y257L | R38G/N138R/V173Y/Y257L/A311G/K336S/ | ++ |
| | | K340W/A388K/V401R/Y404L/L514S/E659R/ | |
| | | D660H | |
| 513/514 | N240M | R38G/N138R/V173Y/N240M/A311G/K336S/ | ++ |
| | | K340W/A388K/V401R/Y404L/L514S/E659R/ | |
| | | D660H | |
| 515/516 | G69S/I161R | R38G/G69S/N138R/I161R/V173Y/A311G/ | ++ |
| | | K336S/K340W/A388K/V401R/Y404L/L514S/ | |
| | | E659R/D660H | |
| 517/518 | L253Y | R38G/N138R/V173Y/L253Y/A311G/K336S/ | ++ |
| | | K340W/A388K/V401R/Y404L/L514S/E659R/ | |
| | | D660H | |
| 519/520 | A14Y | A14Y/R38G/N138R/V173Y/A311G/K336S/ | ++ |
| | | K340W/A388K/V401R/Y404L/L514S/E659R/ | |
| | | D660H | |
| 521/522 | V221C | R38G/N138R/V173Y/V221C/A311G/K336S/ | ++ |
| | | K340W/A388K/V401R/Y404L/L514S/E659R/ | |
| | | D660H | |
| 523/524 | L84A | R38G/L84A/N138R/V173Y/A311G/K336S/ | ++ |
| | | K340W/A388K/V401R/Y404L/L514S/E659R/ | |
| | | D660H | |
| 525/526 | E115V | R38G/E115V/N138R/V173Y/A311G/K336S/ | ++ |
| | | K340W/A388K/V401R/Y404L/L514S/E659R/ | |
| | | D660H | |
| 527/528 | L133C/R150Q | R38G/L133C/N138R/R150Q/V173Y/A311G/ | ++ |
| | | K336S/K340W/A388K/V401R/Y404L/L514S/ | |
| | | E659R/D660H | |
| 529/530 | K60L | R38G/K60L/N138R/V173Y/A311G/K336S/ | ++ |
| | | K340W/A388K/V401R/Y404L/L514S/E659R/ | |
| | | D660H | |
| 531/532 | K60G | R38G/K60G/N138R/V173Y/A311G/K336S/ | ++ |
| | | K340W/A388K/V401R/Y404L/L514S/E659R/ | |
| | | D660H | |
| 533/534 | A32V | A32V/R38G/N138R/V173Y/A311G/K336S/ | ++ |
| | | K340W/A388K/V401R/Y404L/L514S/E659R/ | |
| | | D660H | |
| 535/536 | F275A | R38G/N138R/V173Y/F275A/A311G/K336S/ | ++ |
| | | K340W/A388K/V401R/Y404L/L514S/E659R/ | |
| | | D660H | |
| 537/538 | I89Q | R38G/I89Q/N138R/V173Y/A311G/K336S/ | ++ |
| | | K340W/A388K/V401R/Y404L/L514S/E659R/ | |
| | | D660H | |
| 539/540 | Y257V | R38G/N138R/V173Y/Y257V/A311G/K336S/ | + |
| | | K340W/A388K/V401R/Y404L/L514S/E659R/ | |
| | | D660H | |
| 541/542 | M274L | R38G/N138R/V173Y/M274L/A311G/K336S/ | + |
| | | K340W/A388K/V401R/Y404L/L514S/E659R/ | |
| | | D660H | |
| 543/544 | K15T | K15T/R38G/N138R/V173Y/A311G/K336S/ | + |
| | | K340W/A388K/V401R/Y404L/L514S/E659R/ | |
| | | D660H | |
| 545/546 | A254S | R38G/N138R/V173Y/A254S/A311G/K336S/ | + |
| | | K340W/A388K/V401R/Y404L/L514S/E659R/ | |
| | | D660H | |
| 547/548 | M61W | R38G/M61W/N138R/V173Y/A311G/K336S/ | + |
| | | K340W/A388K/V401R/Y404L/L514S/E659R/ | |
| | | D660H | |
| 549/550 | G625C | R38G/N138R/V173Y/A311G/K336S/K340W/ | + |
| | | A388K/V401R/Y404L/L514S/G625C/E659R/ | |
| | | D660H | |
| 551/552 | A14Q/K67R | A14Q/R38G/K67R/N138R/V173Y/A311G/ | + |
| | | K336S/K340W/A388K/V401R/Y404L/L514S/ | |
| | | E659R/D660H | |
| 553/554 | I21G | I21G/R38G/N138R/V173Y/A311G/K336S/ | + |
| | | K340W/A388K/V401R/Y404L/L514S/E659R/ | |
| | | D660H | |
| 555/556 | A254G | R38G/N138R/V173Y/A254G/A311G/K336S/ | + |
| | | K340W/A388K/V401R/Y404L/L514S/E659R/ | |
| | | D660H | |
| 557/558 | N93Y | R38G/N93Y/N138R/V173Y/A311G/K336S/ | + |
| | | K340W/A388K/V401R/Y404L/L514S/E659R/ | |
| | | D660H | |
| 559/560 | T250R | R38G/N138R/V173Y/T250R/A311G/K336S/ | + |
| | | K340W/A388K/V401R/Y404L/L514S/E659R/ | |
| | | D660H | |
| 561/562 | I217V | R38G/N138R/V173Y/I217V/A311G/K336S/ | + |
| | | K340W/A388K/V401R/Y404L/L514S/E659R/ | |
| | | D660H | |
| 563/564 | K60M | R38G/K60M/N138R/V173Y/A311G/K336S/ | + |
| | | K340W/A388K/V401R/Y404L/L514S/E659R/ | |
| | | D660H | |
| 565/566 | Q239L | R38G/N138R/V173Y/Q239L/A311G/K336S/ | + |
| | | K340W/A388K/V401R/Y404L/L514S/E659R/ | |
| | | D660H | |
| 567/568 | A75S | R38G/A75S/N138R/V173Y/A311G/K336S/ | + |
| | | K340W/A388K/V401R/Y404L/L514S/E659R/ | |
| | | D660H | |
| 569/570 | A32T | A32T/R38G/N138R/V173Y/A311G/K336S/ | + |
| | | K340W/A388K/V401R/Y404L/L514S/E659R/ | |
| | | D660H | |
| 571/572 | S19E | S19E/R38G/N138R/V173Y/A311G/K336S/ | + |
| | | K340W/A388K/V401R/Y404L/L514S/E659R/ | |
| | | D660H | |
| 573/574 | W95Y | R38G/W95Y/N138R/V173Y/A311G/K336S/ | + |
| | | K340W/A388K/V401R/Y404L/L514S/E659R/ | |
| | | D660H | |
| 575/576 | I81L | R38G/I81L/N138R/V173Y/A311G/K336S/ | + |
| | | K340W/A388K/V401R/Y404L/L514S/E659R/ | |
| | | D660H | |
| 577/578 | K60R | R38G/K60R/N138R/V173Y/A311G/K336S/ | + |
| | | K340W/A388K/V401R/Y404L/L514S/E659R/ | |
| | | D660H | |
| 579/580 | L759M | R38G/N138R/V173Y/A311G/K336S/K340W/ | + |
| | | A388K/V401R/Y404L/L514S/E659R/D660H/ | |
| | | L759M | |
| 581/582 | F62T | R38G/F62T/N138R/V173Y/A311G/K336S/ | + |
| | | K340W/A388K/V401R/Y404L/L514S/E659R/ | |
| | | D660H | |
| 583/584 | T140R | R38G/N138R/T140R/V173Y/A311G/K336S/ | + |
| | | K340W/A388K/V401R/Y404L/L514S/E659R/ | |
| | | D660H | |

Levels of increased activity were determined relative to the reference polypeptide of SEQ ID NO: 238 and defined as follows: “+” 1.00 to 1.45 (first 50%), “++” >1.45 (next 30%), “+++” >1.78 (top 20%)

### Example 15

### Improvements Over RNA Polymerase of SEQ ID NO: 394

[0433] SEQ ID NO: 394 was selected as the parent enzyme in the in vitro transcription (IVT) assay. Libraries of engineered genes were produced using known techniques (e.g., saturation mutagenesis, recombination of previously identified beneficial mutations). The polypeptides encoded by each gene were produced in HIP as described in Example 2 and purified as described in Example 3. Each variant was diluted 4-fold in RNase-free water and screened in a 1 μL reaction that comprised 0.05 μg/μL 11 kb-DNA template, 40 mM Tris-HCl pH 8.0, 42 mM magnesium acetate, 10 mM ATP, 10 mM GTP, 10 mM CTP, 10 mM UTP, 1 U/μL Ribolock RNase Inhibitor (Thermo Scientific, Catalog #E00382), and 0.002 U/μL Pyrophosphatase (Thermo Scientific, Catalog #EF0221). The reactions were initiated by adding 150 nL of the HIP purified variants, incubated in Bio-Rad Hard-Shell® 96-Well PCR plates at 25° C. for 2 h and quenched with 125 nL of 0.5 M EDTA. Quenched mixtures were diluted 100-fold with RNase-free water, and RNA concentrations were measure by using the Quant-iT™ RNA Assay Kits—Broad Range (Thermo Fisher, Catalog #Q10213). Activity relative to SEQ ID NO: 394 (Activity FIOP) was calculated as the RNA produced by variant over the RNA produced by SEQ ID NO: 394. The result is shown in Table 15.1.

TABLE 15.1
Activities of Variants Relative to SEQ ID: 394

| | Amino Acid | Amino Acid | FIOP Product |
|---|---|---|---|
| SEQ ID | Differences | Differences | Relative to |
| NO: | (Relative to | (Relative to | SEQ ID NO: |
| (nt/aa) | SEQ ID NO: 394) | SEQ ID NO: 2) | 394 |
| 585/586 | T609E/H779R | R38G/N138R/K170L/A311G/K336S/K340W/R357E/ | +++ |
| | | A388K/R394K/V401R/Y404L/L514S/T609E/ | |
| | | E659R/D660H/W664P/H779R | |
| 587/588 | Q246K/T609E | R38G/N138R/K170L/Q246K/A311G/K336S/ | ++ |
| | | K340W/R357E/A388K/R394K/V401R/Y404L/L514S/ | |
| | | T609E/E659R/D660H/W664P | |
| 589/590 | Q246K | R38G/N138R/K170L/Q246K/A311G/K336S/K340W/ | ++ |
| | | R357E/A388K/R394K/V401R/Y404L/L514S/ | |
| | | E659R/D660H/W664P | |
| 591/592 | T609E/E775K/H779R | R38G/N138R/K170L/A311G/K336S/K340W/R357E/ | ++ |
| | | A388K/R394K/V401R/Y404L/L514S/T609E/ | |
| | | E659R/D660H/W664P/E775K/H779R | |
| 593/594 | K105R | R38G/K105R/N138R/K170L/A311G/K336S/K340W/ | + |
| | | R357E/A388K/R394K/V401R/Y404L/L514S/ | |
| | | E659R/D660H/W664P | |
| 595/596 | A143N/T609E/E775K | R38G/N138R/A143N/K170L/A311G/K336S/K340W/ | + |
| | | R357E/A388K/R394K/V401R/Y404L/L514S/ | |
| | | T609E/E659R/D660H/W664P/E775K | |
| 597/598 | K105R/S135K/T609E/ | R38G/K105R/S135K/N138R/K170L/A311G/K336S/ | + |
| | E775K | K340W/R357E/A388K/R394K/V401R/Y404L/L514S/ | |
| | | T609E/E659R/D660H/W664P/E775K | |
| 599/600 | Q111K/T609E | R38G/Q111K/N138R/K170L/A311G/K336S/K340W/ | + |
| | | R357E/A388K/R394K/V401R/Y404L/L514S/ | |
| | | T609E/E659R/D660H/W664P | |
| 601/602 | T609E | R38G/N138R/K170L/A311G/K336S/K340W/R357E/ | + |
| | | A388K/R394K/V401R/Y404L/L514S/T609E/ | |
| | | E659R/D660H/W664P | |

Levels of increased activity were determined relative to the reference polypeptide of SEQ ID NO: 394 and defined as follows: “+” 1.06 to 2.44 (first 50%), “++” >2.44 (next 30%), “+++” >3.37 (top 20%)

### Example 16

### Improvements Over RNA Polymerase of SEQ ID NO: 588

[0434] SEQ ID NO: 588 was selected as the parent enzyme in the in vitro transcription (IVT) assay. Libraries of engineered genes were produced using known techniques (e.g., saturation mutagenesis, recombination of previously identified beneficial mutations). The polypeptides encoded by each gene were produced in HIP as described in Example 2 and purified as described in Example 3. Each variant was diluted 4-fold in RNase-free water and screened in a 1 μL reaction that comprised 0.05 μg/μL 11 kb-DNA template, 40 mM Tris-HCl pH 8.0, 50 mM magnesium acetate, 12 mM ATP, 12 mM GTP, 12 mM CTP, 12 mM UTP, 1 U/μL Ribolock RNase Inhibitor (Thermo Scientific, Catalog #E00382), and 0.002 U/μL Pyrophosphatase (Thermo Scientific, Catalog #EF0221). The reactions were initiated by adding 150 nL of the HIP purified variants, incubated in Bio-Rad Hard-Shell® 96-Well PCR plates at 25° C. for 2 h and quenched with 125 nL of 0.5 M EDTA. Quenched mixtures were diluted 100-fold with RNase-free water, and RNA concentrations were measure by using the Quant-iT™ RNA Assay Kits—Broad Range (Thermo Fisher, Catalog #Q10213). Activity relative to SEQ ID NO: 588 (Activity FIOP) was calculated as the RNA produced by variant over the RNA produced by SEQ ID NO: 588. The result is shown in Table 16.1.

TABLE 16.1
Activities of Variants Relative to SEQ ID NO: 588

| | Amino Acid | Amino Acid | FIOP Product |
|---|---|---|---|
| SEQ ID | Differences | Differences | Relative to |
| NO: | (Relative to | (Relative to | SEQ ID NO: |
| (nt/aa) | SEQ ID NO: 588) | SEQ ID NO: 2) | 588 |
| 603/604 | A32V | A32V/R38G/N138R/K170L/Q246K/A311G/K336S/ | +++ |
| | | K340W/R357E/A388K/R394K/V401R/Y404L/L514S/ | |
| | | T609E/E659R/D660H/W664P | |
| 605/606 | H531Q/L533S | R38G/N138R/K170L/Q246K/A311G/K336S/K340W/ | + |
| | | R357E/A388K/R394K/V401R/Y404L/L514S/H531Q/ | |
| | | L533S/T609E/E659R/D660H/W664P | |
| 607/608 | E115L | R38G/E115L/N138R/K170L/Q246K/A311G/K336S/ | + |
| | | K340W/R357E/A388K/R394K/V401R/Y404L/L514S/ | |
| | | T609E/E659R/D660H/W664P | |
| 609/610 | T83K | R38G/T83K/N138R/K170L/Q246K/A311G/K336S/ | + |
| | | K340W/R357E/A388K/R394K/V401R/Y404L/L514S/ | |
| | | T609E/E659R/D660H/W664P | |
| 611/612 | A32V/K60M/M61W | A32V/R38G/K60M/M61W/N138R/K170L/Q246K/ | + |
| | | A311G/K336S/K340W/R357E/A388K/R394K/V401R/ | |
| | | Y404L/L514S/T609E/E659R/D660H/W664P | |
| 613/614 | E55D | R38G/E55D/N138R/K170L/Q246K/A311G/K336S/ | +++ |
| | | K340W/R357E/A388K/R394K/V401R/Y404L/L514S/ | |
| | | T609E/E659R/D660H/W664P | |
| 615/616 | L589C | R38G/N138R/K170L/Q246K/A311G/K336S/K340W/ | +++ |
| | | R357E/A388K/R394K/V401R/Y404L/L514S/L589C/ | |
| | | T609E/E659R/D660H/W664P | |
| 617/618 | E357P | R38G/N138R/K170L/Q246K/A311G/K336S/K340W/ | +++ |
| | | R357P/A388K/R394K/V401R/Y404L/L514S/T609E/ | |
| | | E659R/D660H/W664P | |
| 619/620 | K617R | R38G/N138R/K170L/Q246K/A311G/K336S/K340W/ | +++ |
| | | R357E/A388K/R394K/V401R/Y404L/L514S/T609E/ | |
| | | K617R/E659R/D660H/W664P | |
| 621/622 | N172G | R38G/N138R/K170L/N172G/Q246K/A311G/K336S/ | +++ |
| | | K340W/R357E/A388K/R394K/V401R/Y404L/L514S/ | |
| | | T609E/E659R/D660H/W664P | |
| 623/624 | D598A | R38G/N138R/K170L/Q246K/A311G/K336S/K340W/ | +++ |
| | | R357E/A388K/R394K/V401R/Y404L/L514S/D598A/ | |
| | | T609E/E659R/D660H/W664P | |
| 625/626 | A56G/V193G | R38G/A56G/N138R/K170L/V193G/Q246K/A311G/ | ++ |
| | | K336S/K340W/R357E/A388K/R394K/V401R/Y404L/ | |
| | | L514S/T609E/E659R/D660H/W664P | |
| 627/628 | A56T | R38G/A56T/N138R/K170L/Q246K/A311G/K336S/ | ++ |
| | | K340W/R357E/A388K/R394K/V401R/Y404L/L514S/ | |
| | | T609E/E659R/D660H/W664P | |
| 629/630 | N536V | R38G/N138R/K170L/Q246K/A311G/K336S/K340W/ | ++ |
| | | R357E/A388K/R394K/V401R/Y404L/L514S/N536V/ | |
| | | T609E/E659R/D660H/W664P | |
| 631/632 | E52T | R38G/E52T/N138R/K170L/Q246K/A311G/K336S/ | ++ |
| | | K340W/R357E/A388K/R394K/V401R/Y404L/L514S/ | |
| | | T609E/E659R/D660H/W664P | |
| 633/634 | D17N | D17N/R38G/N138R/K170L/Q246K/A311G/K336S/ | ++ |
| | | K340W/R357E/A388K/R394K/V401R/Y404L/L514S/ | |
| | | T609E/E659R/D660H/W664P | |
| 635/636 | A56N | R38G/A56N/N138R/K170L/Q246K/A311G/K336S/ | ++ |
| | | K340W/R357E/A388K/R394K/V401R/Y404L/L514S/ | |
| | | T609E/E659R/D660H/W664P | |
| 637/638 | D598K | R38G/N138R/K170L/Q246K/A311G/K336S/K340W/ | ++ |
| | | R357E/A388K/R394K/V401R/Y404L/L514S/D598K/ | |
| | | T609E/E659R/D660H/W664P | |
| 639/640 | I261M | R38G/N138R/K170L/Q246K/I261M/A311G/K336S/ | ++ |
| | | K340W/R357E/A388K/R394K/V401R/Y404L/L514S/ | |
| | | T609E/E659R/D660H/W664P | |
| 641/642 | A56E | R38G/A56E/N138R/K170L/Q246K/A311G/K336S/ | ++ |
| | | K340W/R357E/A388K/R394K/V401R/Y404L/L514S/ | |
| | | T609E/E659R/D660H/W664P | |
| 643/644 | E55S | R38G/E55S/N138R/K170L/Q246K/A311G/K336S/ | ++ |
| | | K340W/R357E/A388K/R394K/V401R/Y404L/L514S/ | |
| | | T609E/E659R/D660H/W664P | |
| 645/646 | N536E | R38G/N138R/K170L/Q246K/A311G/K336S/K340W/ | ++ |
| | | R357E/A388K/R394K/V401R/Y404L/L514S/N536E/ | |
| | | T609E/E659R/D660H/W664P | |
| 647/648 | D598L | R38G/N138R/K170L/Q246K/A311G/K336S/K340W/ | ++ |
| | | R357E/A388K/R394K/V401R/Y404L/L514S/D598L/ | |
| | | T609E/E659R/D660H/W664P | |
| 649/650 | K78S | R38G/K78S/N138R/K170L/Q246K/A311G/K336S/ | + |
| | | K340W/R357E/A388K/R394K/V401R/Y404L/L514S/ | |
| | | T609E/E659R/D660H/W664P | |
| 651/652 | A56V | R38G/A56V/N138R/K170L/Q246K/A311G/K336S/ | + |
| | | K340W/R357E/A388K/R394K/V401R/Y404L/L514S/ | |
| | | T609E/E659R/D660H/W664P | |
| 653/654 | A629R | R38G/N138R/K170L/Q246K/A311G/K336S/K340W/ | + |
| | | R357E/A388K/R394K/V401R/Y404L/L514S/T609E/ | |
| | | A629R/E659R/D660H/W664P | |
| 655/656 | D598R | R38G/N138R/K170L/Q246K/A311G/K336S/K340W/ | + |
| | | R357E/A388K/R394K/V401R/Y404L/L514S/D598R/ | |
| | | T609E/E659R/D660H/W664P | |
| 657/658 | E63S | R38G/E63S/N138R/K170L/Q246K/A311G/K336S/ | + |
| | | K340W/R357E/A388K/R394K/V401R/Y404L/L514S/ | |
| | | T609E/E659R/D660H/W664P | |
| 659/660 | T82S | R38G/T82S/N138R/K170L/Q246K/A311G/K336S/ | + |
| | | K340W/R357E/A388K/R394K/V401R/Y404L/L514S/ | |
| | | T609E/E659R/D660H/W664P | |
| 661/662 | A207S | R38G/N138R/K170L/A207S/Q246K/A311G/K336S/ | + |
| | | K340W/R357E/A388K/R394K/V401R/Y404L/L514S/ | |
| | | T609E/E659R/D660H/W664P | |
| 663/664 | D598V | R38G/N138R/K170L/Q246K/A311G/K336S/K340W/ | + |
| | | R357E/A388K/R394K/V401R/Y404L/L514S/D598V/ | |
| | | T609E/E659R/D660H/W664P | |
| 665/666 | I666M | R38G/N138R/K170L/Q246K/A311G/K336S/K340W/ | + |
| | | R357E/A388K/R394K/V401R/Y404L/L514S/T609E/ | |
| | | E659R/D660H/W664P/I666M | |
| 667/668 | R150Y | R38G/N138R/R150Y/K170L/Q246K/A311G/K336S/ | + |
| | | K340W/R357E/A388K/R394K/V401R/Y404L/L514S/ | |
| | | T609E/E659R/D660H/W664P | |
| 669/670 | A45K | R38G/A45K/N138R/K170L/Q246K/A311G/K336S/ | + |
| | | K340W/R357E/A388K/R394K/V401R/Y404L/L514S/ | |
| | | T609E/E659R/D660H/W664P | |
| 671/672 | E55W | R38G/E55W/N138R/K170L/Q246K/A311G/K336S/ | + |
| | | K340W/R357E/A388K/R394K/V401R/Y404L/L514S/ | |
| | | T609E/E659R/D660H/W664P | |
| 673/674 | S135G | R38G/S135G/N138R/K170L/Q246K/A311G/K336S/ | + |
| | | K340W/R357E/A388K/R394K/V401R/Y404L/L514S/ | |
| | | T609E/E659R/D660H/W664P | |
| 675/676 | I13N | I13N/R38G/N138R/K170L/Q246K/A311G/K336S/ | + |
| | | K340W/R357E/A388K/R394K/V401R/Y404L/L514S/ | |
| | | T609E/E659R/D660H/W664P | |
| 677/678 | D33E | D33E/R38G/N138R/K170L/Q246K/A311G/K336S/ | + |
| | | K340W/R357E/A388K/R394K/V401R/Y404L/L514S/ | |
| | | T609E/E659R/D660H/W664P | |
| 679/680 | G245C | R38G/N138R/K170L/G245C/Q246K/A311G/K336S/ | + |
| | | K340W/R357E/A388K/R394K/V401R/Y404L/L514S/ | |
| | | T609E/E659R/D660H/W664P | |

Levels of increased activity were determined relative to the reference polypeptide of SEQ ID NO: 588 and defined as follows: “+” 1.01 to 1.35 (first 50%), “++” >1.35 (next 30%), “+++” >1.83 (top 20%)

### Example 17

### Improvements Over RNA Polymerase of SEQ ID NO: 604

[0435] SEQ ID NO: 604 was selected as the parent enzyme in the in vitro transcription (IVT) assay. Libraries of engineered genes were produced using known techniques (e.g., saturation mutagenesis, recombination of previously identified beneficial mutations). The polypeptides encoded by each gene were produced in HIP as described in Example 2 and purified as described in Example 3. Each variant was diluted 4-fold in RNase-free water and screened in a 1 μL reaction that comprised 0.05 μg/μL 11 kb-DNA template, 40 mM Tris-HCl pH 8.0, 50 mM magnesium acetate, 12 mM ATP, 12 mM GTP, 12 mM CTP, 12 mM UTP, 1 U/μL Ribolock RNase Inhibitor (Thermo Scientific, Catalog #E00382), and 0.002 U/μL Pyrophosphatase (Thermo Scientific, Catalog #EF0221). The reactions were initiated by adding 150 nL of the HIP purified variants, incubated in Bio-Rad Hard-Shell® 96-Well PCR plates at 25° C. for 2 h and quenched with 125 nL of 0.5 M EDTA. Quenched mixtures were diluted 100-fold with RNase-free water, and RNA concentrations were measure by using the Quant-iT™ RNA Assay Kits—Broad Range (Thermo Fisher, Catalog #Q10213). Activity relative to SEQ ID NO: 604 (Activity FIOP) was calculated as the RNA produced by variant over the RNA produced by SEQ ID NO: 604. The result is shown in Table 17.1.

TABLE 17.1
Activities of Variants Relative to SEQ ID NO: 604

| | Amino Acid | Amino Acid | |
|---|---|---|---|
| SEQ ID | Differences | Differences | FIOP Product |
| NO: | (Relative to | (Relative to | Relative to SEQ |
| (nt/aa) | SEQ ID NO: 604) | SEQ ID NO: 2) | ID NO: 604 |
| 681/682 | A207S/G245C/A629R | A32V/R38G/N138R/K170L/A207S/G245C/ | +++ |
| | | Q246K/A311G/K336S/K340W/R357E/A388K/ | |
| | | R394K/V401R/Y404L/L514S/T609E/A629R/ | |
| | | E659R/D660H/W664P | |
| 683/684 | D17N/A56E/R150Y/ | D17N/A32V/R38G/A56E/N138R/R150Y/K170L/ | ++ |
| | D598A | Q246K/A311G/K336S/K340W/R357E/A388K/ | |
| | | R394K/V401R/Y404L/L514S/D598A/T609E/ | |
| | | E659R/D660H/W664P | |
| 685/686 | A56E/A629R | A32V/R38G/A56E/N138R/K170L/Q246K/ | ++ |
| | | A311G/K336S/K340W/R357E/A388K/R394K/ | |
| | | V401R/Y404L/L514S/T609E/A629R/E659R/ | |
| | | D660H/W664P | |
| 687/688 | N536V | A32V/R38G/N138R/K170L/Q246K/A311G/ | ++ |
| | | K336S/K340W/R357E/A388K/R394K/V401R/ | |
| | | Y404L/L514S/N536V/T609E/E659R/D660H/ | |
| | | W664P | |
| 689/690 | Y185P | A32V/R38G/N138R/K170L/Y185P/Q246K/ | ++ |
| | | A311G/K336S/K340W/R357E/A388K/R394K/ | |
| | | V401R/Y404L/L514S/T609E/E659R/D660H/ | |
| | | W664P | |
| 691/692 | A56T/R150Y | A32V/R38G/A56T/N138R/R150Y/K170L/ | + |
| | | Q246K/A311G/K336S/K340W/R357E/A388K/ | |
| | | R394K/V401R/Y404L/L514S/T609E/E659R/ | |
| | | D660H/W664P | |
| 693/694 | D17N/A56E/R150Y/ | D17N/A32V/R38G/A56E/N138R/R150Y/K170L/ | + |
| | A207S/G245C/D598A/ | A207S/G245C/Q246K/A311G/K336S/K340W/ | |
| | K617R/A629R | R357E/A388K/R394K/V401R/Y404L/L514S/ | |
| | | D598A/T609E/K617R/A629R/E659R/D660H/ | |
| | | W664P | |
| 695/696 | A56E/R150Y/N536V/ | A32V/R38G/A56E/N138R/R150Y/K170L/ | + |
| | D598K | Q246K/A311G/K336S/K340W/R357E/A388K/ | |
| | | R394K/V401R/Y404L/L514S/N536V/D598K/ | |
| | | T609E/E659R/D660H/W664P | |
| 697/698 | A56V/N536V | A32V/R38G/A56V/N138R/K170L/Q246K/ | + |
| | | A311G/K336S/K340W/R357E/A388K/R394K/ | |
| | | V401R/Y404L/L514S/N536V/T609E/E659R/ | |
| | | D660H/W664P | |
| 699/700 | Y185P/I666M | A32V/R38G/N138R/K170L/Y185P/Q246K/ | + |
| | | A311G/K336S/K340W/R357E/A388K/R394K/ | |
| | | V401R/Y404L/L514S/T609E/E659R/D660H/ | |
| | | W664P/I666M | |
| 701/702 | R150Y | A32V/R38G/N138R/R150Y/K170L/Q246K/ | +++ |
| | | A311G/K336S/K340W/R357E/A388K/R394K/ | |
| | | V401R/Y404L/L514S/T609E/E659R/D660H/ | |
| | | W664P | |
| 703/704 | A143N/R150Y/K246V/ | A32V/R38G/N138R/A143N/R150Y/K170L/ | + |
| | E782V | Q246V/A311G/K336S/K340W/R357E/A388K/ | |
| | | R394K/V401R/Y404L/L514S/T609E/E659R/ | |
| | | D660H/W664P/E782V | |

Levels of increased activity were determined relative to the reference polypeptide of SEQ ID NO: 604 and
defined as follows: “+” 1.01 to 1.06 (first 50%), “++” > 1.06 (next 30%), “+++” > 1.17 (top 20%)

### Example 18

### Improvements Over RNA Polymerase of SEQ ID NO: 686

[0436] SEQ ID NO: 686 was selected as the parent enzyme in the in vitro transcription (IVT) assay. Libraries of engineered genes were produced using known techniques (e.g., saturation mutagenesis, recombination of previously identified beneficial mutations). The polypeptides encoded by each gene were produced in HIP as described in Example 2 and purified as described in Example 3. Each variant was diluted 4-fold in RNase-free water and screened in a 1 μL reaction that comprised 0.05 μg/μL 11 kb-DNA template, 40 mM Tris-HCl pH 8.0, 50 mM magnesium acetate, 12 mM ATP, 12 mM GTP, 12 mM CTP, 12 mM UTP, 1 U/μL Ribolock RNase Inhibitor (Thermo Scientific, Catalog #E00382), and 0.002 U/μL Pyrophosphatase (Thermo Scientific, Catalog #EF0221). The reactions were initiated by adding 150 nL of the HIP purified variants, incubated in Bio-Rad Hard-Shell® 96-Well PCR plates at 25° C. for 2 h and quenched with 125 nL of 0.5 M EDTA. Quenched mixtures were diluted 100-fold with RNase-free water, and RNA concentrations were measure by using the Quant-iT™ RNA Assay Kits—Broad Range (Thermo Fisher, Catalog #Q10213). Activity relative to SEQ ID NO: 686 (Activity FIOP) was calculated as the RNA produced by variant over the RNA produced by SEQ ID NO: 686. The result is shown in Table 18.1.

TABLE 18.1
Activities of Variants Relative to SEQ ID NO: 686

| | Amino Acid | Amino Acid | |
|---|---|---|---|
| SEQ ID | Differences | Differences | FIOP Product |
| NO: | (Relative to | (Relative to | Relative to SEQ |
| (nt/aa) | SEQ ID NO: 686) | SEQ ID NO: 2) | ID NO: 686 |
| 705/706 | A143N | A32V/R38G/A56E/N138R/A143N/K170L/Q246K/ | +++ |
| | | A311G/K336S/K340W/R357E/A388K/R394K/ | |
| | | V401R/Y404L/L514S/T609E/A629R/E659R/ | |
| | | D660H/W664P | |
| 707/708 | K246R/P424A/ | A32V/R38G/A56E/N138R/K170L/Q246R/A311G/ | +++ |
| | S648F/E782V | K336S/K340W/R357E/A388K/R394K/V401R/ | |
| | | Y404L/P424A/L514S/T609E/A629R/S648F/E659R/ | |
| | | D660H/W664P/E782V | |
| 709/710 | K246R/R659E/ | A32V/R38G/A56E/N138R/K170L/Q246R/A311G/ | ++ |
| | E782V | K336S/K340W/R357E/A388K/R394K/V401R/Y404L/ | |
| | | L514S/T609E/A629R/D660H/W664P/E782V | |
| 711/712 | E56T/R150Y/R629A/ | A32V/R38G/A56T/N138R/R150Y/K170L/Q246K/ | ++ |
| | H660W/E782V | A311G/K336S/K340W/R357E/A388K/R394K/V401R/ | |
| | | Y404L/L514S/T609E/E659R/D660W/W664P/E782V | |
| 713/714 | K721T/E782V | A32V/R38G/A56E/N138R/K170L/Q246K/A311G/ | + |
| | | K336S/K340W/R357E/A388K/R394K/V401R/Y404L/ | |
| | | L514S/T609E/A629R/E659R/D660H/W664P/K721T/ | |
| | | E782V | |
| 715/716 | E782V | A32V/R38G/A56E/N138R/K170L/Q246K/A311G/ | + |
| | | K336S/K340W/R357E/A388K/R394K/V401R/Y404L/ | |
| | | L514S/T609E/A629R/E659R/D660H/W664P/E782V | |
| 717/718 | D196G/R659E/E782V | A32V/R38G/A56E/N138R/K170L/D196G/Q246K/ | + |
| | | A311G/K336S/K340W/R357E/A388K/R394K/V401R/ | |
| | | Y404L/L514S/T609E/A629R/D660H/W664P/E782V | |
| 719/720 | K720S/K721A/E782V | A32V/R38G/A56E/N138R/K170L/Q246K/A311G/ | + |
| | | K336S/K340W/R357E/A388K/R394K/V401R/Y404L/ | |
| | | L514S/T609E/A629R/E659R/D660H/W664P/K720S/ | |
| | | K721A/E782V | |

Levels of increased activity were determined relative to the reference polypeptide of SEQ ID NO: 686 and defined as follows: “+” 1.13 to 1.25 (first 50%), “++” >1.25 (next 30%), “+++” >1.40 (top 20%)

### Example 19

### Improvements Over RNA Polymerase of SEQ ID NO: 692

[0437] SEQ ID NO: 692 was selected as the parent enzyme in the in vitro transcription (IVT) assay. Libraries of engineered genes were produced using known techniques (e.g., saturation mutagenesis, recombination of previously identified beneficial mutations). The polypeptides encoded by each gene were produced in HIP as described in Example 2 and purified as described in Example 3. Each variant was diluted 4-fold in RNase-free water and screened in a 1 μL reaction that comprised 0.05 μg/μL 11 kb-DNA template, 40 mM Tris-HCl pH 8.0, 50 mM magnesium acetate, 12 mM ATP, 12 mM GTP, 12 mM CTP, 12 mM UTP, 1 U/μL Ribolock RNase Inhibitor (Thermo Scientific, Catalog #E00382), and 0.002 U/μL Pyrophosphatase (Thermo Scientific, Catalog #EF0221). The reactions were initiated by adding 150 nL of the HIP purified variants, incubated in Bio-Rad Hard-Shell® 96-Well PCR plates at 25° C. for 2 h and quenched with 125 nL of 0.5 M EDTA. Quenched mixtures were diluted 100-fold with RNase-free water, and RNA concentrations were measure by using the Quant-iT™ RNA Assay Kits—Broad Range (Catalog #Q10213). Activity relative to SEQ ID NO: 692 (Activity FIOP) was calculated as the RNA produced by variant over the RNA produced by SEQ ID NO: 692. The result is shown in Table 19.1.

TABLE 18.1
Activities of Variants Relative to SEQ ID NO: 692

| | Amino Acid | Amino Acid | |
|---|---|---|---|
| SEQ ID | Differences | Differences | FIOP Product |
| NO: | (Relative to | (Relative to | Relative to SEQ |
| (nt/aa) | SEQ ID NO: 692) | SEQ ID NO: 2) | ID NO: 692 |
| 721/722 | A143N/R659E/ | A32V/R38G/A56T/N138R/A143N/R150Y/K170L/ | + |
| | E782V | Q246K/A311G/K336S/K340W/R357E/A388K/R394K/ | |
| | | V401R/Y404L/L514S/T609E/D660H/W664P/E782V | |
| 723/724 | A166T/K171E/ | A32V/R38G/A56T/N138R/R150Y/A166T/K170L/ | + |
| | K246R/G311A | K171E/Q246R/K336S/K340W/R357E/A388K/R394K/ | |
| | | V401R/Y404L/L514S/T609E/E659R/D660H/W664P | |
| 725/726 | A143N/K721T | A32V/R38G/A56T/N138R/A143N/R150Y/K170L/ | + |
| | | Q246K/A311G/K336S/K340W/R357E/A388K/R394K/ | |
| | | V401R/Y404L/L514S/T609E/E659R/D660H/W664P/ | |
| | | K721T | |
| 727/728 | E782V | A32V/R38G/A56T/N138R/R150Y/K170L/Q246K/ | + |
| | | A311G/K336S/K340W/R357E/A388K/R394K/V401R/ | |
| | | Y404L/L514S/T609E/E659R/D660H/W664P/E782V | |
| 729/730 | A143N/K171E/ | A32V/R38G/A56T/N138R/A143N/R150Y/K170L/ | + |
| | R659E/E782V | K171E/Q246K/A311G/K336S/K340W/R357E/A388K/ | |
| | | R394K/V401R/Y404L/L514S/T609E/D660H/W664P/ | |
| | | E782V | |

Levels of increased activity were determined relative to the reference polypeptide of SEQ ID NO: 692 and defined as follows: “+” from 1.24 to 1.42

### Example 20

### Improvements Over RNA Polymerase of SEQ ID NO: 2

[0438] The polypeptides encoded by the following genes were generated and purified from the shake flask cultures as described in Example 4. Each variant was assayed in a 200 μL reaction that comprised 0.05 μg/μL 9 kb-DNA template, 30 mM Tris-HCl pH 8.0, 26.9 mM magnesium chloride, 5 mM ATP, 5 mM GTP, 5 mM CTP, 5 mM UTP, 1 U/μL Ribolock RNase Inhibitor (Thermo Scientific, Catalog #E00382), 0.002 U/μL Pyrophosphatase (Thermo Scientific, Catalog #EF0221), and a final concentration of 20 ng/μL of variants. The IVI reactions were initiated by adding the variants, incubated in Bio-Rad Hard-Shell® 96-Well PCR plates at 25° C. for 2 h, and quenched with 25 μL of 0.5 MEDA. Quenched mixtures were diluted 40-fold with TE buffer (10 mM Tris-HCl pH 7.0 and 0.1 mM EDTA) and analyzed on the Fragment Analyzer (Agilent 5300 Fragment Analyzer) with the RNA Kit (Agilent DNF-471-1000). Integrity relative to SEQ ID NO: 2 (Integrity FIOP) was calculated as the integrity of RNA produced by variant over the integrity of RNA produced by SEQ ID NO: 2. The result is shown in Table 20.1.

TABLE 20.1
Integrities of Variants Relative to SEQ ID NO: 2

| | Amino Acid | |
|---|---|---|
| SEQ ID | Differences | FIOP Product |
| NO: | (Relative to | Relative to SEQ ID |
| (nt/aa) | SEQ ID NO: 2) | NO: 2 |
| 31/32 | N138R/A311G/K336S/K340W/A388K/V401R/Y404L | + |
| 41/42 | N138R/A311G/K336S/K340W/A388K/V401R/Y404L/L514S | + |
| 43/44 | R38G/N138R/A311G/K336S/K340W/A388K/V401R/Y404L/L514S | + |
| 153/154 | N138R/K170Q/A311G/K336S/A388K/V401R/Y404L/L514S/E659R/ | + |
| | D660H/G810K | |
| 149/150 | N138R/V173Y/A311G/K336S/K340W/A388K/V401R/Y404L/L514S/ | + |
| | E659R/D660H | |

Levels of increased activity were determined relative to the reference polypeptide of SEQ ID NO: 2 and defined as follows: “+” from 2.72 to 3.33

### Example 21

### Improvements Over RNA Polymerase of SEQ ID NO: 150

[0439] The polypeptides encoded by the following genes were generated and purified from the shake flask cultures as described in Example 4. Each variant was assayed in a 200 μL reaction that comprised 0.05 μg/μL 8 kb-DNA template, 40 mM Tris-HCl pH 8.0, 30 mM magnesium acetate, 7.5 mM ATP, 7.5 mM GTP, 7.5 mM CTP, 7.5 mM UTP, 1 U/μL Ribolock RNase Inhibitor (Thermo Scientific, Catalog #E00382), 0.002 U/μL Pyrophosphatase (Thermo Scientific, Catalog #EF0221), and a final concentration of 20 ng/μL of variants. The IVT reactions were initiated by adding the variants, incubated in Bio-Rad Hard-Shell® 96-Well PCR plates at 25° C. for 2 h, and quenched with 25 μL of 0.5 M EDTA. Quenched mixtures were diluted 40-fold with TE buffer (10 mM Tris-HCl pH 7.0 and 0.1 mM EDTA) and analyzed on the Fragment Analyzer (Agilent 5300 Fragment Analyzer) with the RNA Kit (Agilent DNF-471-1000). Integrity relative to SEQ ID NO: 150 (Integrity FIOP) was calculated as the integrity of RNA produced by variant over the integrity of RNA produced by SEQ ID NO: 150. The result is shown in Table 21.1.

TABLE 21.1
Integrities of Variants Relative to SEQ ID NO: 150

| | | Amino Acid | FIOP Product |
|---|---|---|---|
| SEQ ID | Amino Acid Differences | Differences | Relative to |
| NO: | (Relative to | (Relative to | SEQ ID NO: |
| (nt/aa) | SEQ ID NO: 150) | SEQ ID NO: 2) | 150 |
| 393/394 | R38G/K170L/Y173V/ | R38G/N138R/K170L/A311G/K336S/K340W/ | + |
| | R357E/R394K/W664P | R357E/A388K/R394K/V401R/Y404L/L514S/E659R/ | |
| | | D660H/W664P | |
| 587/588 | R38G/K170L/Y173V/ | R38G/N138R/K170L/Q246K/A311G/K336S/K340W/ | + |
| | Q246K/R357E/R394K/ | R357E/A388K/R394K/V401R/Y404L/L514S/ | |
| | T609E/W664P | T609E/E659R/D660H/W664P | |
| 603/604 | A32V/R38G/K170L/ | A32V/R38G/N138R/K170L/Q246K/A311G/K336S/ | + |
| | Y173V/Q246K/R357E/ | K340W/R357E/A388K/R394K/V401R/Y404L/ | |
| | R394K/T609E/W664P | L514S/T609E/E659R/D660H/W664P | |

Levels of increased activity were determined relative to the reference polypeptide of SEQ ID NO: 150 and defined as follows: “+” from 1.11 to 1.43

### Example 22

### Improvements Over SEQ ID NO: 150 in RNA Polymerase Integrity

[0440] The polypeptides encoded by the following genes were generated and purified from the shake flask cultures as described in Example 4. Each variant was assayed in a 200 μL reaction that comprised 0.05 μg/μL 11 kb-DNA template, 40 mM Tris-HCl pH 8.0, 40 mM magnesium acetate, 10 mM ATP, 10 mM GTP, 10 mM CTP, 10 mM UTP, 1 U/μL Ribolock RNase Inhibitor (Thermo Scientific, Catalog #E00382), 0.002 U/μL Pyrophosphatase (Thermo Scientific, Catalog #EF0221), and a final concentration of 20 ng/μL of variants. The IVT reactions were initiated by adding the variants, incubated in Bio-Rad Hard-Shell® 96-Well PCR plates at 25° C. for 2 h, and quenched with 25 μL of 0.5 M EDTA. Quenched mixtures were diluted 40-fold with TE buffer (10 mM Tris-HCl pH 7.0 and 0.1 mM EDTA) and analyzed on the Fragment Analyzer (Agilent 5300 Fragment Analyzer) with the RNA Kit (Agilent DNF-471-1000). Integrity relative to SEQ ID NO: 150 (Integrity FIOP) was calculated as the integrity of RNA produced by variant over the integrity of RNA produced by SEQ ID NO: 150. The result is shown in Table 22.1.

TABLE 22.1
Integrities of Variants Relative to SEQ ID NO: 150

| | Amino Acid | Amino Acid | FIOP Product |
|---|---|---|---|
| SEQ ID | Differences | Differences | Relative to |
| NO: | (Relative to | (Relative to | SEQ ID NO: |
| (nt/aa) | SEQ ID NO: 150) | SEQ ID NO: 2) | 150 |
| 393/394 | R38G/K170L/Y173V/ | R38G/N138R/K170L/A311G/K336S/K340W/ | + |
| | R357E/R394K/W664P | R357E/A388K/R394K/V401R/Y404L/L514S/E659R/ | |
| | | D660H/W664P | |
| 587/588 | R38G/K170L/Y173V/ | R38G/N138R/K170L/Q246K/A311G/K336S/K340W/ | + |
| | Q246K/R357E/R394K/ | R357E/A388K/R394K/V401R/Y404L/L514S/T609E/ | |
| | T609E/W664P | E659R/D660H/W664P | |
| 603/604 | A32V/R38G/K170L/ | A32V/R38G/N138R/K170L/Q246K/A311G/K336S/ | ++ |
| | Y173V/Q246K/R357E/ | K340W/R357E/A388K/R394K/V401R/Y404L/L514S/ | |
| | R394K/T609E/W664P | T609E/E659R/D660H/W664P | |
| 685/686 | A32V/R38G/A56E/K170L/ | A32V/R38G/A56E/N138R/K170L/Q246K/A311G/ | ++ |
| | Y173V/Q246K/R357E/ | K336S/K340W/R357E/A388K/R394K/V401R/Y404L/ | |
| | R394K/T609E/A629R/ | L514S/T609E/A629R/E659R/D660H/W664P | |
| | W664P | | |
| 705/706 | A32V/R38G/A56E/A143N/ | A32V/R38G/A56E/N138R/A143N/K170L/Q246K/ | +++ |
| | K170L/Y173V/Q246K/ | A311G/K336S/K340W/R357E/A388K/R394K/ | |
| | R357E/R394K/T609E/ | V401R/Y404L/L514S/T609E/A629R/E659R/D660H/ | |
| | A629R/W664P | W664P | |
| 727/728 | A32V/R38G/A56T/R150Y/ | A32V/R38G/A56T/N138R/R150Y/K170L/Q246K/ | + |
| | K170L/Y173V/Q246K/ | A311G/K336S/K340W/R357E/A388K/R394K/ | |
| | R357E/R394K/T609E/ | V401R/Y404L/L514S/T609E/E659R/D660H/W664P/ | |
| | W664P/E782V | E782V | |

Levels of increased activity were determined relative to the reference polypeptide of SEQ ID NO: 2 and defined as follows: “+” .98 to 1.12 (first 50%), “++” >1.12 (next 30%), “+++” >2.24 (top 20%)

### Example 23

### Improvements Over SEQ ID NO: 712 in RNA Polymerase Integrity

[0441] SEQ ID NO: 712 was selected as the parent enzyme in the in vitro transcription (IVT) assay. Libraries of engineered genes were produced using known techniques (e.g., saturation mutagenesis, recombination of previously identified beneficial mutations). The polypeptides encoded by each gene were produced in HTP as described in Example 2 and purified as described in Example 3. Each variant was diluted 4-fold in RNase-free water and screened in a 1 μL reaction that comprised 0.05 μg/μL 11 kb-DNA template, 40 mM Tris-HCl pH 8.0, 50 mM magnesium acetate, 12 mM ATP, 12 mM GTP, 12 mM CTP, 12 mM UTP, 1 U/μL Ribolock RNase Inhibitor (Thermo Scientific, Catalog #E00382), and 0.002 U/μL Pyrophosphatase (Thermo Scientific, Catalog #EF0221). The reactions were initiated by adding 150 nL of the HIP purified variants, incubated in Bio-Rad Hard-Shell® 96-Well PCR plates at 25° C. for 2 h and quenched with 125 nL of 0.5 M EDTA. Quenched mixtures were diluted 100-fold with RNase-free water, and RNA concentrations were measure by using the Quant-iT™ RNA Assay Kits—Broad Range (Thermo Fisher, Catalog #Q10213). Activity relative to SEQ ID NO: 712 (Activity FIOP) was calculated as the RNA produced by variant over the RNA produced by SEQ ID NO: 712. The result is shown in Table 23.1.

TABLE 23.1
Activities of Variants Relative to SEQ ID NO: 712

| | Amino Acid | Amino Acid | |
|---|---|---|---|
| SEQ ID | Differences | Differences | FIOP Product |
| NO: | (Relative to SEQ | (Relative to | Relative to SEQ |
| (nt/aa) | ID NO: 712) | SEQ ID NO: 2) | ID NO: 712 |
| 731/732 | L367P | A32V/R38G/A56T/N138R/R150Y/K170L/Q246K/A311G/ | +++ |
| | | K336S/K340W/R357E/L367P/A388K/R394K/V401R/ | |
| | | Y404L/L514S/T609E/E659R/D660W/W664P/E782V | |
| 733/734 | T382R | A32V/R38G/A56T/N138R/R150Y/K170L/Q246K/A311G/ | +++ |
| | | K336S/K340W/R357E/T382R/A388K/R394K/V401R/ | |
| | | Y404L/L514S/T609E/E659R/D660W/W664P/E782V | |
| 735/736 | K670R | A32V/R38G/A56T/N138R/R150Y/K170L/Q246K/A311G/ | +++ |
| | | K336S/K340W/R357E/A388K/R394K/V401R/Y404L/ | |
| | | L514S/T609E/E659R/D660W/W664P/K670R/E782V | |
| 737/738 | T382L | A32V/R38G/A56T/N138R/R150Y/K170L/Q246K/A311G/ | +++ |
| | | K336S/K340W/R357E/T382L/A388K/R394K/V401R/ | |
| | | Y404L/L514S/T609E/E659R/D660W/W664P/E782V | |
| 739/740 | L672P | A32V/R38G/A56T/N138R/R150Y/K170L/Q246K/A311G/ | +++ |
| | | K336S/K340W/R357E/A388K/R394K/V401R/Y404L/ | |
| | | L514S/T609E/E659R/D660W/W664P/L672P/E782V | |
| 741/742 | E357P | A32V/R38G/A56T/N138R/R150Y/K170L/Q246K/A311G/ | +++ |
| | | K336S/K340W/R357P/A388K/R394K/V401R/Y404L/ | |
| | | L514S/T609E/E659R/D660W/W664P/E782V | |
| 743/744 | K388R | A32V/R38G/A56T/N138R/R150Y/K170L/Q246K/A311G/ | +++ |
| | | K336S/K340W/R357E/A388R/R394K/V401R/Y404L/ | |
| | | L514S/T609E/E659R/D660W/W664P/E782V | |
| 745/746 | S693R | A32V/R38G/A56T/N138R/R150Y/K170L/Q246K/A311G/ | ++ |
| | | K336S/K340W/R357E/A388K/R394K/V401R/Y404L/ | |
| | | L514S/T609E/E659R/D660W/W664P/S693R/E782V | |
| 747/748 | L672S | A32V/R38G/A56T/N138R/R150Y/K170L/Q246K/A311G/ | ++ |
| | | K336S/K340W/R357E/A388K/R394K/V401R/Y404L/ | |
| | | L514S/T609E/E659R/D660W/W664P/L672S/E782V | |
| 749/750 | A397S | A32V/R38G/A56T/N138R/R150Y/K170L/Q246K/A311G/ | ++ |
| | | K336S/K340W/R357E/A388K/R394K/A397S/V401R/ | |
| | | Y404L/L514S/T609E/E659R/D660W/W664P/E782V | |
| 751/752 | D375P | A32V/R38G/A56T/N138R/R150Y/K170L/Q246K/A311G/ | ++ |
| | | K336S/K340W/R357E/D375P/A388K/R394K/V401R/ | |
| | | Y404L/L514S/T609E/E659R/D660W/W664P/E782V | |
| 753/754 | L672G | A32V/R38G/A56T/N138R/R150Y/K170L/Q246K/A311G/ | ++ |
| | | K336S/K340W/R357E/A388K/R394K/V401R/Y404L/ | |
| | | L514S/T609E/E659R/D660W/W664P/L672G/E782V | |
| 755/756 | D137G/T382R/ | A32V/R38G/A56T/D137G/N138R/R150Y/K170L/Q246K/ | ++ |
| | V782E | A311G/K336S/K340W/R357E/T382R/A388K/R394K/ | |
| | | V401R/Y404L/L514S/T609E/E659R/D660W/W664P | |
| 757/758 | Q655R | A32V/R38G/A56T/N138R/R150Y/K170L/Q246K/A311G/ | ++ |
| | | K336S/K340W/R357E/A388K/R394K/V401R/Y404L/ | |
| | | L514S/T609E/Q655R/E659R/D660W/W664P/E782V | |
| 759/760 | D137G/T382R/ | A32V/R38G/A56T/D137G/N138R/R150Y/K170L/Q246K/ | ++ |
| | Y392A | A311G/K336S/K340W/R357E/T382R/A388K/Y392A/ | |
| | | R394K/V401R/Y404L/L514S/T609E/E659R/D660W/ | |
| | | W664P/E782V | |
| 761/762 | V391F | A32V/R38G/A56T/N138R/R150Y/K170L/Q246K/A311G/ | ++ |
| | | K336S/K340W/R357E/A388K/V391F/R394K/V401R/ | |
| | | Y404L/L514S/T609E/E659R/D660W/W664P/E782V | |
| 763/764 | D137G/Q655M/ | A32V/R38G/A56T/D137G/N138R/R150Y/K170L/Q246K/ | + |
| | K721T/R763S | A311G/K336S/K340W/R357E/A388K/R394K/V401R/ | |
| | | Y404L/L514S/T609E/Q655M/E659R/D660W/W664P/ | |
| | | K721T/R763S/E782V | |
| 765/766 | V696L | A32V/R38G/A56T/N138R/R150Y/K170L/Q246K/A311G/ | + |
| | | K336S/K340W/R357E/A388K/R394K/V401R/Y404L/ | |
| | | L514S/T609E/E659R/D660W/W664P/V696L/E782V | |
| 767/768 | L672R | A32V/R38G/A56T/N138R/R150Y/K170L/Q246K/A311G/ | + |
| | | K336S/K340W/R357E/A388K/R394K/V401R/Y404L/ | |
| | | L514S/T609E/E659R/D660W/W664P/L672R/E782V | |
| 769/770 | Q663L | A32V/R38G/A56T/N138R/R150Y/K170L/Q246K/A311G/ | + |
| | | K336S/K340W/R357E/A388K/R394K/V401R/Y404L/ | |
| | | L514S/T609E/E659R/D660W/Q663L/W664P/E782V | |
| 771/772 | L367T | A32V/R38G/A56T/N138R/R150Y/K170L/Q246K/A311G/ | + |
| | | K336S/K340W/R357E/L367T/A388K/R394K/V401R/ | |
| | | Y404L/L514S/T609E/E659R/D660W/W664P/E782V | |
| 773/774 | L367F | A32V/R38G/A56T/N138R/R150Y/K170L/Q246K/A311G/ | + |
| | | K336S/K340W/R357E/L367F/A388K/R394K/V401R/ | |
| | | Y404L/L514S/T609E/E659R/D660W/W664P/E782V | |
| 775/776 | D137G/T382G | A32V/R38G/A56T/D137G/N138R/R150Y/K170L/Q246K/ | + |
| | | A311G/K336S/K340W/R357E/T382G/A388K/R394K/ | |
| | | V401R/Y404L/L514S/T609E/E659R/D660W/W664P/ | |
| | | E782V | |
| 777/778 | D137G/T382G/ | A32V/R38G/A56T/D137G/N138R/R150Y/K170L/Q246K/ | + |
| | Y392R/E650M/ | A311G/K336S/K340W/R357E/T382G/A388K/Y392R/ | |
| | Q655M/V782E | R394K/V401R/Y404L/L514S/T609E/E650M/Q655M/ | |
| | | E659R/D660W/W664P | |
| 779/780 | D137G/T382R/ | A32V/R38G/A56T/D137G/N138R/R150Y/K170L/Q246K/ | + |
| | A629R/W660Y/ | A311G/K336S/K340W/R357E/T382R/A388K/R394K/ | |
| | L672T | V401R/Y404L/L514S/T609E/A629R/E659R/D660Y/ | |
| | | W664P/L672T/E782V | |
| 781/782 | V391S | A32V/R38G/A56T/N138R/R150Y/K170L/Q246K/ | + |
| | | A311G/K336S/K340W/R357E/A388K/V391S/R394K/ | |
| | | V401R/Y404L/L514S/T609E/E659R/D660W/W664P/ | |
| | | E782V | |
| 783/784 | V616A | A32V/R38G/A56T/N138R/R150Y/K170L/Q246K/A311G/ | + |
| | | K336S/K340W/R357E/A388K/R394K/V401R/Y404L/ | |
| | | L514S/T609E/V616A/E659R/D660W/W664P/E782V | |
| 785/786 | E690S | A32V/R38G/A56T/N138R/R150Y/K170L/Q246K/A311G/ | + |
| | | K336S/K340W/R357E/A388K/R394K/V401R/Y404L/ | |
| | | L514S/T609E/E659R/D660W/W664P/E690S/E782V | |
| 787/788 | K179N | A32V/R38G/A56T/N138R/R150Y/K170L/K179N/Q246K/ | + |
| | | A311G/K336S/K340W/R357E/A388K/R394K/V401R/ | |
| | | Y404L/L514S/T609E/E659R/D660W/W664P/E782V | |
| 789/790 | D137G | A32V/R38G/A56T/D137G/N138R/R150Y/K170L/Q246K/ | + |
| | | A311G/K336S/K340W/R357E/A388K/R394K/V401R/ | |
| | | Y404L/L514S/T609E/E659R/D660W/W664P/E782V | |
| 791/792 | E357P/T382R/ | A32V/R38G/A56T/N138R/R150Y/K170L/Q246K/A311G/ | ++ |
| | K670R | K336S/K340W/R357P/T382R/A388K/R394K/V401R/ | |
| | | Y404L/L514S/T609E/E659R/D660W/W664P/K670R/ | |
| | | E782V | |
| 793/794 | K388R/K670R/ | A32V/R38G/A56T/N138R/R150Y/K170L/Q246K/A311G/ | ++ |
| | L672P | K336S/K340W/R357E/A388R/R394K/V401R/Y404L/ | |
| | | L514S/T609E/E659R/D660W/W664P/K670R/L672P/ | |
| | | E782V | |
| 795/796 | E357P/D375P | A32V/R38G/A56T/N138R/R150Y/K170L/Q246K/A311G/ | + |
| | | K336S/K340W/R357P/D375P/A388K/R394K/V401R/ | |
| | | Y404L/L514S/T609E/E659R/D660W/W664P/E782V | |
| 797/798 | E357P/L672G | A32V/R38G/A56T/N138R/R150Y/K170L/Q246K/A311G/ | + |
| | | K336S/K340W/R357P/A388K/R394K/V401R/Y404L/ | |
| | | L514S/T609E/E659R/D660W/W664P/L672G/E782V | |
| 799/800 | A629K | A32V/R38G/A56T/N138R/R150Y/K170L/Q246K/A311G/ | + |
| | | K336S/K340W/R357E/A388K/R394K/V401R/Y404L/ | |
| | | L514S/T609E/A629K/E659R/D660W/W664P/E782V | |
| 801/802 | Q655R/K670R | A32V/R38G/A56T/N138R/R150Y/K170L/Q246K/A311G/ | + |
| | | K336S/K340W/R357E/A388K/R394K/V401R/Y404L/ | |
| | | L514S/T609E/Q655R/E659R/D660W/W664P/K670R/ | |
| | | E782V | |

Levels of increased activity were determined relative to the reference polypeptide of SEQ ID NO: 712 and defined as follows: “+” 1.01 to 1.17 (first 50%), “++” >1.17 (next 30%), “+++” >1.42 (top 20%)

### Example 24

### Improvements Over SEQ ID NO: 800 in RNA Polymerase Processivity

[0442] SEQ ID NO: 800 was selected as the parent enzyme in the in vitro transcription (IVT) assay. Libraries of engineered genes were produced using known techniques (e.g., saturation mutagenesis, recombination of previously identified beneficial mutations). The polypeptides encoded by each gene were produced in HIP as described in Example 2 and purified as described in Example 3. Each variant was diluted 4-fold in RNase-free water and screened in a 1 μL reaction that comprised 0.05 μg/μL 11 kb-DNA template, 40 mM Tris-HCl pH 8.0, 50 mM magnesium acetate, 12 mM ATP, 12 mM GTP, 12 mM CTP, 12 mM UTP, 1 U/μL Ribolock RNase Inhibitor (Thermo Scientific, Catalog #E00382), and 0.002 U/μL Pyrophosphatase (Thermo Scientific, Catalog #EF0221). The reactions were initiated by adding 150 nL of the HIP purified variants, incubated in Bio-Rad Hard-Shell® 96-Well PCR plates at 25° C. for 2 h and quenched with 125 nL of 0.5 M EDTA. Quenched mixtures were diluted 100-fold with RNase-free water, and RNA concentrations were measure by using the Quant-iT™ RNA Assay Kits—Broad Range (Thermo Fisher, Catalog #Q10213). Activity relative to SEQ ID NO: 800 (Activity FIOP) was calculated as the RNA produced by variant over the RNA produced by SEQ ID NO: 800. The result is shown in Table 24.1.

TABLE 24.1
Activities of Variants Relative to SEQ ID NO: 800

| | Amino Acid | Amino Acid | |
|---|---|---|---|
| SEQ ID | Differences | Differences | FIOP Product |
| NO: | (Relative to SEQ | (Relative to | Relative to SEQ |
| (nt/aa) | ID NO: 800) | SEQ ID NO: 2) | ID NO: 800 |
| 803/804 | D137G | A32V/R38G/A56T/D137G/N138R/R150Y/K170L/Q246K/ | +++ |
| | | A311G/K336S/K340W/R357E/A388K/R394K/V401R/ | |
| | | Y404L/L514S/T609E/A629K/E659R/D660W/W664P/ | |
| | | E782V | |
| 805/806 | T56E/G311A/ | A32V/R38G/A56E/N138R/R150Y/K170L/Q246K/K336S/ | +++ |
| | T382R | K340W/R357E/T382R/A388K/R394K/V401R/Y404L/ | |
| | | L514S/T609E/A629K/E659R/D660W/W664P/E782V | |
| 807/808 | T56E/D137G/ | A32V/R38G/A56E/D137G/N138R/A143N/R150Y/K170L/ | ++ |
| | A143N/K721A | Q246K/A311G/K336S/K340W/R357E/A388K/R394K/ | |
| | | V401R/Y404L/L514S/T609E/A629K/E659R/D660W/ | |
| | | W664P/K721A/E782V | |
| 809/810 | D137G/Y392A | A32V/R38G/A56T/D137G/N138R/R150Y/K170L/Q246K/ | ++ |
| | | A311G/K336S/K340W/R357E/A388K/Y392A/R394K/ | |
| | | V401R/Y404L/L514S/T609E/A629K/E659R/D660W/ | |
| | | W664P/E782V | |
| 811/812 | T56E/D137G/ | A32V/R38G/A56E/D137G/N138R/R150Y/K170L/ | ++ |
| | Y392A | Q246K/A311G/K336S/K340W/R357E/A388K/Y392A/ | |
| | | R394K/V401R/Y404L/L514S/T609E/A629K/E659R/ | |
| | | D660W/W664P/E782V | |
| 813/814 | T56A/D137G/ | A32V/R38G/D137G/N138R/A143N/R150Y/K170L/ | + |
| | A143N/L404Y/ | Q246K/A311G/K336S/K340W/R357E/A388K/R394K/ | |
| | K720S | V401R/L514S/T609E/A629K/E659R/D660W/W664P/ | |
| | | K720S/E782V | |
| 815/816 | T56E/A143N/ | A32V/R38G/A56E/N138R/A143N/R150Y/K170L/ | ++ |
| | K246R | Q246R/A311G/K336S/K340W/R357E/A388K/R394K/ | |
| | | V401R/Y404L/L514S/T609E/A629K/E659R/D660W/ | |
| | | W664P/E782V | |
| 817/818 | T56E/Y392R | A32V/R38G/A56E/N138R/R150Y/K170L/Q246K/ | + |
| | | A311G/K336S/K340W/R357E/A388K/Y392R/R394K/ | |
| | | V401R/Y404L/L514S/T609E/A629K/E659R/D660W/ | |
| | | W664P/E782V | |
| 819/820 | Y392R/L404Y | A32V/R38G/A56T/N138R/R150Y/K170L/Q246K/ | + |
| | | A311G/K336S/K340W/R357E/A388K/Y392R/R394K/ | |
| | | V401R/L514S/T609E/A629K/E659R/D660W/ | |
| | | W664P/E782V | |
| 821/822 | Y392R | A32V/R38G/A56T/N138R/R150Y/K170L/Q246K/ | + |
| | | A311G/K336S/K340W/R357E/A388K/Y392R/R394K/ | |
| | | V401R/Y404L/L514S/T609E/A629K/E659R/D660W/ | |
| | | W664P/E782V | |
| 823/824 | D137G/Y392R | A32V/R38G/A56T/D137G/N138R/R150Y/K170L/Q246K/ | + |
| | | A311G/K336S/K340W/R357E/A388K/Y392R/R394K/ | |
| | | V401R/Y404L/L514S/T609E/A629K/E659R/D660W/ | |
| | | W664P/E782V | |
| 825/826 | T56E/D137G | A32V/R38G/A56E/D137G/N138R/R150Y/K170L/Q246K/ | + |
| | | A311G/K336S/K340W/R357E/A388K/R394K/V401R/ | |
| | | Y404L/L514S/T609E/A629K/E659R/D660W/W664P/ | |
| | | E782V | |
| 827/828 | T56E/D196S/ | A32V/R38G/A56E/N138R/R150Y/K170L/D196S/Q246K/ | + |
| | Y392A | A311G/K336S/K340W/R357E/A388K/Y392A/R394K/ | |
| | | V401R/Y404L/L514S/T609E/A629K/E659R/D660W/ | |
| | | W664P/E782V | |

Levels of increased activity were determined relative to the reference polypeptide of SEQ ID NO: 800 and defined as follows: “+” 1.13 to 1.44 (first 50%), “++” >1.44 (next 30%), “+++” >1.73 (top 20%)

[0443] While the invention has been described with reference to the specific embodiments, various changes can be made and equivalents can be substituted to adapt to a particular situation, material, composition of matter, process, process step or steps, thereby achieving benefits of the invention without departing from the scope of what is claimed.

[0444] For all purposes, each and every publication and patent document cited in this disclosure is incorporated herein by reference as if each such publication or document was specifically and individually indicated to be incorporated herein by reference. Citation of publications and patent documents is not intended as an indication that any such document is pertinent prior art, nor does it constitute an admission as to its contents or date.

The application's sequence listing, which the Patent Office published only in electronic form, follows.

SEQUENCE LISTING (828 sequences)

SEQ ID NO: 1 - DNA, 2670 bp, synthetic construct
  misc_feature 1..2670: note = Variant of RNA polymerase
  source 1..2670: mol_type = other DNA
atgcaccatcaccatcaccatatgaacacgattaacatcgctaagaacgacttctctgacatcgaactggctgctatcccgttcaacactctggctgaccattacggtgagcgtttagctcgcgaacagttggcccttgagcatgagtcttacgagatgggtgaagcacgcttccgcaagatgtttgagcgtcaacttaaagctggtgaggttgcggataacgctgccgccaagcctctcatcactaccctactccctaagatgattgcacgcatcaacgactggtttgaggaagtgaaagctaagcgcggcaagcgcccgacagccttccagttcctgcaagaaatcaagccggaagccgtagcgtacatcaccattaagaccactctggcttgcctaaccagtgcggacaatacaaccgttcaggctgtagcaagcgcaatcggtcgggccattgaggacgaggctcgcttcggtcgtatccgtgaccttgaagctaagcacttcaagaaaaacgttgaggaacaactcaacaagcgcgtagggcacgtctacaagaaagcatttatgcaagttgtcgaggctgacatgctctctaagggtctactcggtggcgaggcgtggtcttcgtggcataaggaagactctattcatgtaggagtacgctgcatcgagatgctcattgagtcaaccggaatggttagcttacaccgccaaaatgctggcgtagtaggtcaagactctgagactatcgaactcgcacctgaatacgctgaggctatcgcaacccgtgcaggtgcgctggctggcatctctccgatgttccaaccttgcgtagttcctcctaagccgtggactggcattactggtggtggctattgggctaacggtcgtcgtcctctggcgctggtgcgtactcacagtaagaaagcactgatgcgctacgaagacgtttacatgcctgaggtgtacaaagcgattaacattgcgcaaaacaccgcatggaaaatcaacaagaaagtcctagcggtcgccaacgtaatcaccaagtggaagcattgtccggtccgggacatccctgcgattgagcgtgaagaactcccgatgaaaccggaagacatcgacatgaatcctgaggctctcaccgcgtggaaacgtgctgccgctgctgtgtaccgcagagacaaggctcgcaagtctgttcgtatctatcttgagttcatgcttgagcaagccaataagtttgctaaccataaggccatctggttcccttacaacatggactggcgcggtcgtgtttacgctgtgtcaatgttcaacccgcaaggtaacgatatgaccaaaggactgcttacgctggcgaaaggtaaaccaatcggtaaggaaggttactactggctgaaaatccacggtgcaaactgtgcgggtgtcgataaggttccgttccctgagcgcatcaagttcattgaggaaaaccacgagaacatcatggcttgcgctaagtctccactggagaacacttggtgggctgagcaagatctcccgttctgcttccttgcgttctgctttgagtacgctggggtacagcaccacggcctgagctataactgctcccttccgctggcgtttgacgggtcttgctctggcatccagcacttctccgcgatgctccgagatgaggtaggtggtcgcgcggttaacttgcttcctagtgaaaccgttcaggacatctacgggattgttgctaagaaagtcaacgagattctacaagcagacgcaatcaatgggaccgataacgaagtagttaccgtgaccgatgagaacactggtgaaatctctgagaaagtcaagctgggcactaaggcactggctggtcaatggctggcttacggtgttactcgcagtgtgactaagcgttcagtcatgacgctggcttacgggtccaaagagttcggcttccgtcaacaagtgctggaagatactattcagtgggctattgattccggcaagggtctgatgttcactcagccgaatcaggctgctggatacatggctaagctgatttgggaatctgtgagcgtgacggtggtagctgcggttgaagcaatgaactggcttaagtctgctgctaagctgctggctgctgaggtcaaagataagaagactggagagattcttcgcaagcgttgcgctgtgcattgggtaactcctgatggtttccctgtgtggcaggaatacaagaagcctattcagacgcgcttgaacctgatgttcctcggtcagttccgcttacagcctaccattaacaccaacaaagatagcgagattgatgcacacaaacaggagtctggtatcgctcctaactttgtacacagccaagacggtagccaccttcgtaagactgtagtgtgggcacacgagaagtacggaatcgaatcttttgcactgattcacgactccttcggtaccattccggctgacgctgcgaacctgttcaaagcagtgcgcgaaactatggttgacacatatgagtcttgtgatgtactggctgatttctacgaccagttcgctgaccagttgcacgagtctcaattggacaaaatgccagcacttccggctaaaggtaacttgaacctccgtgacatcttagagtcggacttcgcgttcgcg

SEQ ID NO: 2 - protein, 890 aa, synthetic construct
  REGION 1..890: note = Variant of RNA polymerase
MHHHHHHMNTINIAKNDFSDIELAAIPFNTLADHYGERLAREQLALEHESYEMGEARFRKMFERQLKAGEVADNAAAKPLITTLLPKMIARINDWFEEVKAKRGKRPTAFQFLQEIKPEAVAYITIKTTLACLTSADNTTVQAVASAIGRAIEDEARFGRIRDLEAKHFKKNVEEQLNKRVGHVYKKAFMQVVEADMLSKGLLGGEAWSSWHKEDSIHVGVRCIEMLIESTGMVSLHRQNAGVVGQDSETIELAPEYAEAIATRAGALAGISPMFQPCVVPPKPWTGITGGGYWANGRRPLALVRTHSKKALMRYEDVYMPEVYKAINIAQNTAWKINKKVLAVANVITKWKHCPVRDIPAIEREELPMKPEDIDMNPEALTAWKRAAAAVYRRDKARKSVRIYLEFMLEQANKFANHKAIWFPYNMDWRGRVYAVSMFNPQGNDMTKGLLTLAKGKPIGKEGYYWLKIHGANCAGVDKVPFPERIKFIEENHENIMACAKSPLENTWWAEQDLPFCFLAFCFEYAGVQHHGLSYNCSLPLAFDGSCSGIQHFSAMLRDEVGGRAVNLLPSETVQDIYGIVAKKVNEILQADAINGTDNEVVTVTDENTGEISEKVKLGTKALAGQWLAYGVTRSVTKRSVMTLAYGSKEFGFRQQVLEDTIQWAIDSGKGLMFTQPNQAAGYMAKLIWESVSVTVVAAVEAMNWLKSAAKLLAAEVKDKKTGEILRKRCAVHWVTPDGFPVWQEYKKPIQTRLNLMFLGQFRLQPTINTNKDSEIDAHKQESGIAPNFVHSQDGSHLRKTVVWAHEKYGIESFALIHDSFGTIPADAANLFKAVRETMVDTYESCDVLADFYDQFADQLHESQLDKMPALPAKGNLNLRDILESDFAFA

SEQ ID NO: 3 - DNA, 2670 bp, synthetic construct
  misc_feature 1..2670: note = Variant of RNA polymerase
  source 1..2670: mol_type = other DNA
atgcaccatcaccatcaccatatgaacacgattaacatcgctaagaacgacttctctgacatcgaactggctgctatcccgttcaacactctggctgaccattacggtgagcgtttagctcgcgaacagttggcccttgagcatgagtcttacgagatgggtgaagcacgcttccgcaagatgtttgagcgtcaacttaaagctggtgaggttgcggataacgctgccgccaagcctctcatcactaccctactccctaagatgattgcacgcatcaacgactggtttgaggaagtgaaagctaagcgcggcaagcgcccgacagccttccagttcctgcaagaaatcaagccggaagccgtagcgtacatcaccattaagaccactctggcttgcctaaccagtgcggacaatacaaccgttcaggctgtagcaagcgcaatcggtcgggccattgaggacgaggctcgcttcggtcgtatccgtgaccttgaagctaagcacttcaagaaaaacgttgaggaacaactcaacaagcgcgtagggcacgtctacaagaaagcatttatgcaagttgtcgaggctgacatgctctctaagggtctactcggtggcgaggcgtggtcttcgtggcataaggaagactctattcatgtaggagtacgctgcatcgagatgctcattgagtcaaccggaatggttagcttacaccgccaaaatgctggcgtagtaggtcaagactctgagactatcgaactcgcacctgaatacgctgaggctatcgcaacccgtgcaggtgcgctggctggcatctctccgatgttccaaccttgcgtagttcctcctaagccgtggactggcattactggtggtggctattgggctaacggtcgtcgtcctctggcgctggtgcgtactcacagtaagaaagcactgatgcgctacgaagacgtttacatgcctgaggtgtacaaagcgattaacattgcgcaaaacaccgcatggaaaatcaacaagaaagtcctagcggtcgccaacgtaatcaccaagtggaagcattgtccggtccgggacatccctgcgattgagcgtgaagaactcccgatgaaaccggaagacatcgacatgaatcctgaggctctcaccgcgtggaaacgtgctgccgctgctgtgtaccgcagagacaaggctcgcaagtctcgccgtatcttgcttgagttcatgcttgagcaagccaataagtttgctaaccataaggccatctggttcccttacaacatggactggcgcggtcgtgtttacgctgtgtcaatgttcaacccgcaaggtaacgatatgaccaaaggactgcttacgctggcgaaaggtaaaccaatcggtaaggaaggttactactggctgaaaatccacggtgcaaactgtgcgggtgtcgataaggttccgttccctgagcgcatcaagttcattgaggaaaaccacgagaacatcatggcttgcgctaagtctccactggagaacacttggtgggctgagcaagatctcccgttctgcttccttgcgttctgctttgagtacgctggggtacagcaccacggcctgagctataactgctcccttccgctggcgtttgacgggtcttgctctggcatccagcacttctccgcgatgctccgagatgaggtaggtggtcgcgcggttaacttgcttcctagtgaaaccgttcaggacatctacgggattgttgctaagaaagtcaacgagattctacaagcagacgcaatcaatgggaccgataacgaagtagttaccgtgaccgatgagaacactggtgaaatctctgagaaagtcaagctgggcactaaggcactggctggtcaatggctggcttacggtgttactcgcagtgtgactaagcgttcagtcatgacgctggcttacgggtccaaagagttcggcttccgtcaacaagtgctggaagatactattcagtgggctattgattccggcaagggtctgatgttcactcagccgaatcaggctgctggatacatggctaagctgatttgggaatctgtgagcgtgacggtggtagctgcggttgaagcaatgaactggcttaagtctgctgctaagctgctggctgctgaggtcaaagataagaagactggagagattcttcgcaagcgttgcgctgtgcattgggtaactcctgatggtttccctgtgtggcaggaatacaagaagcctattcagacgcgcttgaacctgatgttcctcggtcagttccgcttacagcctaccattaacaccaacaaagatagcgagattgatgcacacaaacaggagtctggtatcgctcctaactttgtacacagccaagacggtagccaccttcgtaagactgtagtgtgggcacacgagaagtacggaatcgaatcttttgcactgattcacgactccttcggtaccattccggctgacgctgcgaacctgttcaaagcagtgcgcgaaactatggttgacacatatgagtcttgtgatgtactggctgatttctacgaccagttcgctgaccagttgcacgagtctcaattggacaaaatgccagcacttccggctaaaggtaacttgaacctccgtgacatcttagagtcggacttcgcgttcgcg

SEQ ID NO: 4 - protein, 890 aa, synthetic construct
  REGION 1..890: note = Variant of RNA polymerase
MHHHHHHMNTINIAKNDFSDIELAAIPFNTLADHYGERLAREQLALEHESYEMGEARFRKMFERQLKAGEVADNAAAKPLITTLLPKMIARINDWFEEVKAKRGKRPTAFQFLQEIKPEAVAYITIKTTLACLTSADNTTVQAVASAIGRAIEDEARFGRIRDLEAKHFKKNVEEQLNKRVGHVYKKAFMQVVEADMLSKGLLGGEAWSSWHKEDSIHVGVRCIEMLIESTGMVSLHRQNAGVVGQDSETIELAPEYAEAIATRAGALAGISPMFQPCVVPPKPWTGITGGGYWANGRRPLALVRTHSKKALMRYEDVYMPEVYKAINIAQNTAWKINKKVLAVANVITKWKHCPVRDIPAIEREELPMKPEDIDMNPEALTAWKRAAAAVYRRDKARKSRRILLEFMLEQANKFANHKAIWFPYNMDWRGRVYAVSMFNPQGNDMTKGLLTLAKGKPIGKEGYYWLKIHGANCAGVDKVPFPERIKFIEENHENIMACAKSPLENTWWAEQDLPFCFLAFCFEYAGVQHHGLSYNCSLPLAFDGSCSGIQHFSAMLRDEVGGRAVNLLPSETVQDIYGIVAKKVNEILQADAINGTDNEVVTVTDENTGEISEKVKLGTKALAGQWLAYGVTRSVTKRSVMTLAYGSKEFGFRQQVLEDTIQWAIDSGKGLMFTQPNQAAGYMAKLIWESVSVTVVAAVEAMNWLKSAAKLLAAEVKDKKTGEILRKRCAVHWVTPDGFPVWQEYKKPIQTRLNLMFLGQFRLQPTINTNKDSEIDAHKQESGIAPNFVHSQDGSHLRKTVVWAHEKYGIESFALIHDSFGTIPADAANLFKAVRETMVDTYESCDVLADFYDQFADQLHESQLDKMPALPAKGNLNLRDILESDFAFA

SEQ ID NO: 5 - DNA, 2670 bp, synthetic construct
  misc_feature 1..2670: note = Variant of RNA polymerase
  source 1..2670: mol_type = other DNA
atgcaccatcaccatcaccatatgaacacgattaacatcgctaagaacgacttctctgacatcgaactggctgctatcccgttcaacactctggctgaccattacggtgagcgtttagctcgcgaacagttggcccttgagcatgagtcttacgagatgggtgaagcacgcttccgcaagatgtttgagcgtcaacttaaagctggtgaggttgcggataacgctgccgccaagcctctcatcactaccctactccctaagatgattgcacgcatcaacgactggtttgaggaagtgaaagctaagcgcggcaagcgcccgacagccttccagttcctgcaagaaatcaagccggaagccgtagcgtacatcaccattaagaccactctggcttgcctaaccagtgcggacaatacaaccgttcaggctgtagcaagcgcaatcggtcgggccattgaggacgaggctcgcttcggtcgtatccgtgaccttgaagctaagcacttcaagaaaaacgttgaggaacaactcaacaagcgcgtagggcacgtctacaagaaagcatttatgcaagttgtcgaggctgacatgctctctaagggtctactcggtggcgaggcgtggtcttcgtggcataaggaagactctattcatgtaggagtacgctgcatcgagatgctcattgagtcaaccggaatggttagcttacaccgccaaaatgctggcgtagtaggtcaagactctgagactatcgaactcgcacctgaatacgctgaggctatcgcaacccgtgcaggtgcgctggctggcatctctccgatgttccaaccttgcgtagttcctcctaagccgtggactggcattactggtggtggctattgggctaacggtcgtcgtcctctggcgctggtgcgtactcacagtaagaaagcactgatgcgctacgaagacgtttacatgcctgaggtgtacaaagcgattaacattgcgcaaaacaccgcatggtcgatcaacaagaaagtcctagcggtcgccaacgtaatcaccaagtggaagcattgtccggtccgggacatccctgcgattgagcgtgaagaactcccgatgaaaccggaagacatcgacatgaatcctgaggctctcaccgcgtggaaacgtgctgccgctgctgtgtaccgcagagacaaggctcgcaagtctgttcgtatctatcttgagttcatgcttgagcaagccaataagtttgctaaccataaggccatctggttcccttacaacatggactggcgcggtcgtgtttacgctgtgtcaatgttcaacccgcaaggtaacgatatgaccaaaggactgcttacgctggcgaaaggtaaaccaatcggtaaggaaggttactactggctgaaaatccacggtgcaaactgtgcgggtgtcgataaggttccgttccctgagcgcatcaagttcattgaggaaaaccacgagaacatcatggcttgcgctaagtctccactggagaacacttggtgggctgagcaagatctcccgttctgcttccttgcgttctgctttgagtacgctggggtacagcaccacggcctgagctataactgctcccttccgctggcgtttgacgggtcttgctctggcatccagcacttctccgcgatgctccgagatgaggtaggtggtcgcgcggttaacttgcttcctagtgaaaccgttcaggacatctacgggattgttgctaagaaagtcaacgagattctacaagcagacgcaatcaatgggaccgataacgaagtagttaccgtgaccgatgagaacactggtgaaatctctgagaaagtcaagctgggcactaaggcactggctggtcaatggctggcttacggtgttactcgcagtgtgactaagcgttcagtcatgacgctggcttacgggtccaaagagttcggcttccgtcaacaagtgctggaagatactattcagtgggctattgattccggcaagggtctgatgttcactcagccgaatcaggctgctggatacatggctaagctgatttgggaatctgtgagcgtgacggtggtagctgcggttgaagcaatgaactggcttaagtctgctgctaagctgctggctgctgaggtcaaagataagaagactggagagattcttcgcaagcgttgcgctgtgcattgggtaactcctgatggtttccctgtgtggcaggaatacaagaagcctattcagacgcgcttgaacctgatgttcctcggtcagttccgcttacagcctaccattaacaccaacaaagatagcgagattgatgcacacaaacaggagtctggtatcgctcctaactttgtacacagccaagacggtagccaccttcgtaagactgtagtgtgggcacacgagaagtacggaatcgaatcttttgcactgattcacgactccttcggtaccattccggctgacgctgcgaacctgttcaaagcagtgcgcgaaactatggttgacacatatgagtcttgtgatgtactggctgatttctacgaccagttcgctgaccagttgcacgagtctcaattggacaaaatgccagcacttccggctaaaggtaacttgaacctccgtgacatcttagagtcggacttcgcgttcgcg

SEQ ID NO: 6 - protein, 890 aa, synthetic construct
  REGION 1..890: note = Variant of RNA polymerase
MHHHHHHMNTINIAKNDFSDIELAAIPFNTLADHYGERLAREQLALEHESYEMGEARFRKMFERQLKAGEVADNAAAKPLITTLLPKMIARINDWFEEVKAKRGKRPTAFQFLQEIKPEAVAYITIKTTLACLTSADNTTVQAVASAIGRAIEDEARFGRIRDLEAKHFKKNVEEQLNKRVGHVYKKAFMQVVEADMLSKGLLGGEAWSSWHKEDSIHVGVRCIEMLIESTGMVSLHRQNAGVVGQDSETIELAPEYAEAIATRAGALAGISPMFQPCVVPPKPWTGITGGGYWANGRRPLALVRTHSKKALMRYEDVYMPEVYKAINIAQNTAWSINKKVLAVANVITKWKHCPVRDIPAIEREELPMKPEDIDMNPEALTAWKRAAAAVYRRDKARKSVRIYLEFMLEQANKFANHKAIWFPYNMDWRGRVYAVSMFNPQGNDMTKGLLTLAKGKPIGKEGYYWLKIHGANCAGVDKVPFPERIKFIEENHENIMACAKSPLENTWWAEQDLPFCFLAFCFEYAGVQHHGLSYNCSLPLAFDGSCSGIQHFSAMLRDEVGGRAVNLLPSETVQDIYGIVAKKVNEILQADAINGTDNEVVTVTDENTGEISEKVKLGTKALAGQWLAYGVTRSVTKRSVMTLAYGSKEFGFRQQVLEDTIQWAIDSGKGLMFTQPNQAAGYMAKLIWESVSVTVVAAVEAMNWLKSAAKLLAAEVKDKKTGEILRKRCAVHWVTPDGFPVWQEYKKPIQTRLNLMFLGQFRLQPTINTNKDSEIDAHKQESGIAPNFVHSQDGSHLRKTVVWAHEKYGIESFALIHDSFGTIPADAANLFKAVRETMVDTYESCDVLADFYDQFADQLHESQLDKMPALPAKGNLNLRDILESDFAFA

SEQ ID NO: 7 - DNA, 2670 bp, synthetic construct
  misc_feature 1..2670: note = Variant of RNA polymerase
  source 1..2670: mol_type = other DNA
atgcaccatcaccatcaccatatgaacacgattaacatcgctaagaacgacttctctgacatcgaactggctgctatcccgttcaacactctggctgaccattacggtgagcgtttagctcgcgaacagttggcccttgagcatgagtcttacgagatgggtgaagcacgcttccgcaagatgtttgagcgtcaacttaaagctggtgaggttgcggataacgctgccgccaagcctctcatcactaccctactccctaagatgattgcacgcatcaacgactggtttgaggaagtgaaagctaagcgcggcaagcgcccgacagccttccagttcctgcaagaaatcaagccggaagccgtagcgtacatcaccattaagaccactctggcttgcctaaccagtgctgaccgtacaaccgttcaggctgtagcaagcgcaatcggtcgggccattgaggacgaggctcgcttcggtcgtatccgtgaccttgaagctaagcacttcaagaaaaacgttgaggaacaactcaacaagcgcgtagggcacgtctacaagaaagcatttatgcaagttgtcgaggctgacatgctctctaagggtctactcggtggcgaggcgtggtcttcgtggcataaggaagactctattcatgtaggagtacgctgcatcgagatgctcattgagtcaaccggaatggttagcttacaccgccaaaatgctggcgtagtaggtcaagactctgagactatcgaactcgcacctgaatacgctgaggctatcgcaacccgtgcaggtgcgctggctggcatctctccgatgttccaaccttgcgtagttcctcctaagccgtggactggcattactggtggtggctattgggctaacggtcgtcgtcctctggcgctggtgcgtactcacagtaagaaagcactgatgcgctacgaagacgtttacatgcctgaggtgtacaaagcgattaacattgcgcaaaacaccgcatggaaaatcaacaagaaagtcctagcggtcgccaacgtaatcaccaagtggaagcattgtccggtccgggacatccctgcgattgagcgtgaagaactcccgatgaaaccggaagacatcgacatgaatcctgaggctctcaccgcgtggaaacgtgctgccgctgctgtgtaccgcagagacaaggctcgcaagtctgttcgtatctatcttgagttcatgcttgagcaagccaataagtttgctaaccataaggccatctggttcccttacaacatggactggcgcggtcgtgtttacgctgtgtcaatgttcaacccgcaaggtaacgatatgaccaaaggactgcttacgctggcgaaaggtaaaccaatcggtaaggaaggttactactggctgaaaatccacggtgcaaactgtgcgggtgtcgataaggttccgttccctgagcgcatcaagttcattgaggaaaaccacgagaacatcatggcttgcgctaagtctccactggagaacacttggtgggctgagcaagatctcccgttctgcttccttgcgttctgctttgagtacgctggggtacagcaccacggcctgagctataactgctcccttccgctggcgtttgacgggtcttgctctggcatccagcacttctccgcgatgctccgagatgaggtaggtggtcgcgcggttaacttgcttcctagtgaaaccgttcaggacatctacgggattgttgctaagaaagtcaacgagattctacaagcagacgcaatcaatgggaccgataacgaagtagttaccgtgaccgatgagaacactggtgaaatctctgagaaagtcaagctgggcactaaggcactggctggtcaatggctggcttacggtgttactcgcagtgtgactaagcgttcagtcatgacgctggcttacgggtccaaagagttcggcttccgtcaacaagtgctggaagatactattcagtgggctattgattccggcaagggtctgatgttcactcagccgaatcaggctgctggatacatggctaagctgatttgggaatctgtgagcgtgacggtggtagctgcggttgaagcaatgaactggcttaagtctgctgctaagctgctggctgctgaggtcaaagataagaagactggagagattcttcgcaagcgttgcgctgtgcattgggtaactcctgatggtttccctgtgtggcaggaatacaagaagcctattcagacgcgcttgaacctgatgttcctcggtcagttccgcttacagcctaccattaacaccaacaaagatagcgagattgatgcacacaaacaggagtctggtatcgctcctaactttgtacacagccaagacggtagccaccttcgtaagactgtagtgtgggcacacgagaagtacggaatcgaatcttttgcactgattcacgactccttcggtaccattccggctgacgctgcgaacctgttcaaagcagtgcgcgaaactatggttgacacatatgagtcttgtgatgtactggctgatttctacgaccagttcgctgaccagttgcacgagtctcaattggacaaaatgccagcacttccggctaaaggtaacttgaacctccgtgacatcttagagtcggacttcgcgttcgcg

SEQ ID NO: 8 - protein, 890 aa, synthetic construct
  REGION 1..890: note = Variant of RNA polymerase
MHHHHHHMNTINIAKNDFSDIELAAIPFNTLADHYGERLAREQLALEHESYEMGEARFRKMFERQLKAGEVADNAAAKPLITTLLPKMIARINDWFEEVKAKRGKRPTAFQFLQEIKPEAVAYITIKTTLACLTSADRTTVQAVASAIGRAIEDEARFGRIRDLEAKHFKKNVEEQLNKRVGHVYKKAFMQVVEADMLSKGLLGGEAWSSWHKEDSIHVGVRCIEMLIESTGMVSLHRQNAGVVGQDSETIELAPEYAEAIATRAGALAGISPMFQPCVVPPKPWTGITGGGYWANGRRPLALVRTHSKKALMRYEDVYMPEVYKAINIAQNTAWKINKKVLAVANVITKWKHCPVRDIPAIEREELPMKPEDIDMNPEALTAWKRAAAAVYRRDKARKSVRIYLEFMLEQANKFANHKAIWFPYNMDWRGRVYAVSMFNPQGNDMTKGLLTLAKGKPIGKEGYYWLKIHGANCAGVDKVPFPERIKFIEENHENIMACAKSPLENTWWAEQDLPFCFLAFCFEYAGVQHHGLSYNCSLPLAFDGSCSGIQHFSAMLRDEVGGRAVNLLPSETVQDIYGIVAKKVNEILQADAINGTDNEVVTVTDENTGEISEKVKLGTKALAGQWLAYGVTRSVTKRSVMTLAYGSKEFGFRQQVLEDTIQWAIDSGKGLMFTQPNQAAGYMAKLIWESVSVTVVAAVEAMNWLKSAAKLLAAEVKDKKTGEILRKRCAVHWVTPDGFPVWQEYKKPIQTRLNLMFLGQFRLQPTINTNKDSEIDAHKQESGIAPNFVHSQDGSHLRKTVVWAHEKYGIESFALIHDSFGTIPADAANLFKAVRETMVDTYESCDVLADFYDQFADQLHESQLDKMPALPAKGNLNLRDILESDFAFA

SEQ ID NO: 9 - DNA, 2670 bp, synthetic construct
  misc_feature 1..2670: note = Variant of RNA polymerase
  source 1..2670: mol_type = other DNA
atgcaccatcaccatcaccatatgaacacgattaacatcgctaagaacgacttctctgacatcgaactggctgctatcccgttcaacactctggctgaccattacggtgagcgtttagctcgcgaacagttggcccttgagcatgagtcttacgagatgggtgaagcacgcttccgcaagatgtttgagcgtcaacttaaagctggtgaggttgcggataacgctgccgccaagcctctcatcactaccctactccctaagatgattgcacgcatcaacgactggtttgaggaagtgaaagctaagcgcggcaagcgcccgacagccttccagttcctgcaagaaatcaagccggaagccgtagcgtacatcaccattaagaccactctggcttgcctaaccagtgcggacaatacaaccgttcaggctgtagcaagcgcaatcggtcgggccattgaggacgaggctcgcttcggtcgtatccgtgaccttgaagctaagcacttcaagaaaaacgttgaggaacaactcaacaagcgcgtagggcacgtctacaagaaagcatttatgcaagttgtcgaggctgacatgctctctaagggtctactcggtggcgaggcgtggtcttcgtggcataaggaagactctattcatgtaggagtacgctgcatcgagatgctcattgagtcaaccggaatggttagcttacaccgccaaaatgctggcgtagtaggtcaagactctgagactatcgaactcgcacctgaatacgctgaggctatcgcaacccgtgcaggtgcgctggctggcatctctccgatgttccaaccttgcgtagttcctcctaagccgtggactggcattactggtggtggctattgggctaacggtcgtcgtcctctggcgctggtgcgtactcacagtaagaaagcactgatgcgctacgaagacgtttacatgcctgaggtgtacaaagcgattaacattgcgcaaaacaccgcatgggttatcaacaagaaagtcctagcggtcgccaacgtaatcaccaagtggaagcattgtccggtccgggacatccctgcgattgagcgtgaagaactcccgatgaaaccggaagacatcgacatgaatcctgaggctctcaccgcgtggaaacgtgctgccgctgctgtgtaccgcagagacaaggctcgcaagtctgttcgtatctatcttgagttcatgcttgagcaagccaataagtttgctaaccataaggccatctggttcccttacaacatggactggcgcggtcgtgtttacgctgtgtcaatgttcaacccgcaaggtaacgatatgaccaaaggactgcttacgctggcgaaaggtaaaccaatcggtaaggaaggttactactggctgaaaatccacggtgcaaactgtgcgggtgtcgataaggttccgttccctgagcgcatcaagttcattgaggaaaaccacgagaacatcatggcttgcgctaagtctccactggagaacacttggtgggctgagcaagatctcccgttctgcttccttgcgttctgctttgagtacgctggggtacagcaccacggcctgagctataactgctcccttccgctggcgtttgacgggtcttgctctggcatccagcacttctccgcgatgctccgagatgaggtaggtggtcgcgcggttaacttgcttcctagtgaaaccgttcaggacatctacgggattgttgctaagaaagtcaacgagattctacaagcagacgcaatcaatgggaccgataacgaagtagttaccgtgaccgatgagaacactggtgaaatctctgagaaagtcaagctgggcactaaggcactggctggtcaatggctggcttacggtgttactcgcagtgtgactaagcgttcagtcatgacgctggcttacgggtccaaagagttcggcttccgtcaacaagtgctggaagatactattcagtgggctattgattccggcaagggtctgatgttcactcagccgaatcaggctgctggatacatggctaagctgatttgggaatctgtgagcgtgacggtggtagctgcggttgaagcaatgaactggcttaagtctgctgctaagctgctggctgctgaggtcaaagataagaagactggagagattcttcgcaagcgttgcgctgtgcattgggtaactcctgatggtttccctgtgtggcaggaatacaagaagcctattcagacgcgcttgaacctgatgttcctcggtcagttccgcttacagcctaccattaacaccaacaaagatagcgagattgatgcacacaaacaggagtctggtatcgctcctaactttgtacacagccaagacggtagccaccttcgtaagactgtagtgtgggcacacgagaagtacggaatcgaatcttttgcactgattcacgactccttcggtaccattccggctgacgctgcgaacctgttcaaagcagtgcgcgaaactatggttgacacatatgagtcttgtgatgtactggctgatttctacgaccagttcgctgaccagttgcacgagtctcaattggacaaaatgccagcacttccggctaaaggtaacttgaacctccgtgacatcttagagtcggacttcgcgttcgcg

SEQ ID NO: 10 - protein, 890 aa, synthetic construct
  REGION 1..890: note = Variant of RNA polymerase
MHHHHHHMNTINIAKNDFSDIELAAIPFNTLADHYGERLAREQLALEHESYEMGEARFRKMFERQLKAGEVADNAAAKPLITTLLPKMIARINDWFEEVKAKRGKRPTAFQFLQEIKPEAVAYITIKTTLACLTSADNTTVQAVASAIGRAIEDEARFGRIRDLEAKHFKKNVEEQLNKRVGHVYKKAFMQVVEADMLSKGLLGGEAWSSWHKEDSIHVGVRCIEMLIESTGMVSLHRQNAGVVGQDSETIELAPEYAEAIATRAGALAGISPMFQPCVVPPKPWTGITGGGYWANGRRPLALVRTHSKKALMRYEDVYMPEVYKAINIAQNTAWVINKKVLAVANVITKWKHCPVRDIPAIEREELPMKPEDIDMNPEALTAWKRAAAAVYRRDKARKSVRIYLEFMLEQANKFANHKAIWFPYNMDWRGRVYAVSMFNPQGNDMTKGLLTLAKGKPIGKEGYYWLKIHGANCAGVDKVPFPERIKFIEENHENIMACAKSPLENTWWAEQDLPFCFLAFCFEYAGVQHHGLSYNCSLPLAFDGSCSGIQHFSAMLRDEVGGRAVNLLPSETVQDIYGIVAKKVNEILQADAINGTDNEVVTVTDENTGEISEKVKLGTKALAGQWLAYGVTRSVTKRSVMTLAYGSKEFGFRQQVLEDTIQWAIDSGKGLMFTQPNQAAGYMAKLIWESVSVTVVAAVEAMNWLKSAAKLLAAEVKDKKTGEILRKRCAVHWVTPDGFPVWQEYKKPIQTRLNLMFLGQFRLQPTINTNKDSEIDAHKQESGIAPNFVHSQDGSHLRKTVVWAHEKYGIESFALIHDSFGTIPADAANLFKAVRETMVDTYESCDVLADFYDQFADQLHESQLDKMPALPAKGNLNLRDILESDFAFA

SEQ ID NO: 11 - DNA, 2670 bp, synthetic construct
  misc_feature 1..2670: note = Variant of RNA polymerase
  source 1..2670: mol_type = other DNA
atgcaccatcaccatcaccatatgaacacgattaacatcgctaagaacgacttctctgacatcgaactggctgctatcccgttcaacactctggctgaccattacggtgagcgtttagctcgcgaacagttggcccttgagcatgagtcttacgagatgggtgaagcacgcttccgcaagatgtttgagcgtcaacttaaagctggtgaggttgcggataacgctgccgccaagcctctcatcactaccctactccctaagatgattgcacgcatcaacgactggtttgaggaagtgaaagctaagcgcggcaagcgcccgacagccttccagttcctgcaagaaatcaagccggaagccgtagcgtacatcaccattaagaccactctggcttgcctaaccagtgcggacaatacaaccgttcaggctgtagcaagcgcaatcggtcgggccattgaggacgaggctcgcttcggtcgtatccgtgaccttgaagctaagcacttcaagaaaaacgttgaggaacaactcaacaagcgcgtagggcacgtctacaagaaagcatttatgcaagttgtcgaggctgacatgctctctaagggtctactcggtggcgaggcgtggtcttcgtggcataaggaagactctattcatgtaggagtacgctgcatcgagatgctcattgagtcaaccggaatggttagcttacaccgccaaaatgctggcgtagtaggtcaagactctgagactatcgaactcgcacctgaatacgctgaggctatcgcaacccgtgcaggtgcgctggctggcatctctccgatgttccaaccttgcgtagttcctcctaagccgtggactggcattactggtggtggctattgggctaacggtcgtcgtcctctggcgctggtgcgtactcacagtaagaaagcactgatgcgctacgaagacgtttacatgcctgaggtgtacaaagcgattaacattgcgcaaaacaccgcatggaaaatcaacaagaaagtcctagcggtcgccaacgtaatcaccaagtggaagcattgtccggtccgggacatccctgcgattgagcgtgaagaactcccgatgaaaccggaagacatcgacatgaatcctgaggctctcaccgcgtggaaacgtgctgccgctgctgtgtaccgcagagacaaggctcgcaagtctcgccgtgttagccttgagttcatgcttgagcaagccaataagtttgctaaccataaggccatctggttcccttacaacatggactggcgcggtcgtgtttacgctgtgtcaatgttcaacccgcaaggtaacgatatgaccaaaggactgcttacgctggcgaaaggtaaaccaatcggtaaggaaggttactactggctgaaaatccacggtgcaaactgtgcgggtgtcgataaggttccgttccctgagcgcatcaagttcattgaggaaaaccacgagaacatcatggcttgcgctaagtctccactggagaacacttggtgggctgagcaagatctcccgttctgcttccttgcgttctgctttgagtacgctggggtacagcaccacggcctgagctataactgctcccttccgctggcgtttgacgggtcttgctctggcatccagcacttctccgcgatgctccgagatgaggtaggtggtcgcgcggttaacttgcttcctagtgaaaccgttcaggacatctacgggattgttgctaagaaagtcaacgagattctacaagcagacgcaatcaatgggaccgataacgaagtagttaccgtgaccgatgagaacactggtgaaatctctgagaaagtcaagctgggcactaaggcactggctggtcaatggctggcttacggtgttactcgcagtgtgactaagcgttcagtcatgacgctggcttacgggtccaaagagttcggcttccgtcaacaagtgctggaagatactattcagtgggctattgattccggcaagggtctgatgttcactcagccgaatcaggctgctggatacatggctaagctgatttgggaatctgtgagcgtgacggtggtagctgcggttgaagcaatgaactggcttaagtctgctgctaagctgctggctgctgaggtcaaagataagaagactggagagattcttcgcaagcgttgcgctgtgcattgggtaactcctgatggtttccctgtgtggcaggaatacaagaagcctattcagacgcgcttgaacctgatgttcctcggtcagttccgcttacagcctaccattaacaccaacaaagatagcgagattgatgcacacaaacaggagtctggtatcgctcctaactttgtacacagccaagacggtagccaccttcgtaagactgtagtgtgggcacacgagaagtacggaatcgaatcttttgcactgattcacgactccttcggtaccattccggctgacgctgcgaacctgttcaaagcagtgcgcgaaactatggttgacacatatgagtcttgtgatgtactggctgatttctacgaccagttcgctgaccagttgcacgagtctcaattggacaaaatgccagcacttccggctaaaggtaacttgaacctccgtgacatcttagagtcggacttcgcgttcgcg

SEQ ID NO: 12 - protein, 890 aa, synthetic construct
  REGION 1..890: note = Variant of RNA polymerase
MHHHHHHMNTINIAKNDFSDIELAAIPFNTLADHYGERLAREQLALEHESYEMGEARFRKMFERQLKAGEVADNAAAKPLITTLLPKMIARINDWFEEVKAKRGKRPTAFQFLQEIKPEAVAYITIKTTLACLTSADNTTVQAVASAIGRAIEDEARFGRIRDLEAKHFKKNVEEQLNKRVGHVYKKAFMQVVEADMLSKGLLGGEAWSSWHKEDSIHVGVRCIEMLIESTGMVSLHRQNAGVVGQDSETIELAPEYAEAIATRAGALAGISPMFQPCVVPPKPWTGITGGGYWANGRRPLALVRTHSKKALMRYEDVYMPEVYKAINIAQNTAWKINKKVLAVANVITKWKHCPVRDIPAIEREELPMKPEDIDMNPEALTAWKRAAAAVYRRDKARKSRRVSLEFMLEQANKFANHKAIWFPYNMDWRGRVYAVSMFNPQGNDMTKGLLTLAKGKPIGKEGYYWLKIHGANCAGVDKVPFPERIKFIEENHENIMACAKSPLENTWWAEQDLPFCFLAFCFEYAGVQHHGLSYNCSLPLAFDGSCSGIQHFSAMLRDEVGGRAVNLLPSETVQDIYGIVAKKVNEILQADAINGTDNEVVTVTDENTGEISEKVKLGTKALAGQWLAYGVTRSVTKRSVMTLAYGSKEFGFRQQVLEDTIQWAIDSGKGLMFTQPNQAAGYMAKLIWESVSVTVVAAVEAMNWLKSAAKLLAAEVKDKKTGEILRKRCAVHWVTPDGFPVWQEYKKPIQTRLNLMFLGQFRLQPTINTNKDSEIDAHKQESGIAPNFVHSQDGSHLRKTVVWAHEKYGIESFALIHDSFGTIPADAANLFKAVRETMVDTYESCDVLADFYDQFADQLHESQLDKMPALPAKGNLNLRDILESDFAFA

SEQ ID NO: 13 - DNA, 2670 bp, synthetic construct
  misc_feature 1..2670: note = Variant of RNA polymerase
  source 1..2670: mol_type = other DNA
atgcaccatcaccatcaccatatgaacacgattaacatcgctaagaacgacttctctgacatcgaactggctgctatcccgttcaacactctggctgaccattacggtgagcgtttagctcgcgaacagttggcccttgagcatgagtcttacgagatgggtgaagcacgcttccgcaagatgtttgagcgtcaacttaaagctggtgaggttgcggataacgctgccgccaagcctctcatcactaccctactccctaagatgattgcacgcatcaacgactggtttgaggaagtgaaagctaagcgcggcaagcgcccgacagccttccagttcctgcaagaaatcaagccggaagccgtagcgtacatcaccattaagaccactctggcttgcctaaccagtgcggacaatacaaccgttcaggctgtagcaagcgcaatcggtcgggccattgaggacgaggctcgcttcggtcgtatccgtgaccttgaagctaagcacttcaagaaaaacgttgaggaacaactcaacaagcgcgtagggcacgtctacaagaaagcatttatgcaagttgtcgaggctgacatgctctctaagggtctactcggtggcgaggcgtggtcttcgtggcataaggaagactctattcatgtaggagtacgctgcatcgagatgctcattgagtcaaccggaatggttagcttacaccgccaaaatgctggcgtagtaggtcaagactctgagactatcgaactcgcacctgaatacgctgaggctatcgcaacccgtgcaggtgcgctggctggcatctctccgatgttccaaccttgcgtagttcctcctaagccgtggactggcattactggtggtggctattgggctaacggtcgtcgtcctctggcgctggtgcgtactcacagtaagaaagcactgatgcgctacgaagacgtttacatgcctgaggtgtacaaagcgattaacattgcgcaaaacaccgcatggatgatcaacaagaaagtcctagcggtcgccaacgtaatcaccaagtggaagcattgtccggtccgggacatccctgcgattgagcgtgaagaactcccgatgaaaccggaagacatcgacatgaatcctgaggctctcaccgcgtggaaacgtgctgccgctgctgtgtaccgcagagacaaggctcgcaagtctgttcgtatctatcttgagttcatgcttgagcaagccaataagtttgctaaccataaggccatctggttcccttacaacatggactggcgcggtcgtgtttacgctgtgtcaatgttcaacccgcaaggtaacgatatgaccaaaggactgcttacgctggcgaaaggtaaaccaatcggtaaggaaggttactactggctgaaaatccacggtgcaaactgtgcgggtgtcgataaggttccgttccctgagcgcatcaagttcattgaggaaaaccacgagaacatcatggcttgcgctaagtctccactggagaacacttggtgggttgagcaagatctcccgttctgcttccttgcgttctgctttgagtacgctggggtacagcaccacggcctgagctataactgctcccttccgctggcgtttgacgggtcttgctctggcatccagcacttctccgcgatgctccgagatgaggtaggtggtcgcgcggttaacttgcttcctagtgaaaccgttcaggacatctacgggattgttgctaagaaagtcaacgagattctacaagcagacgcaatcaatgggaccgataacgaagtagttaccgtgaccgatgagaacactggtgaaatctctgagaaagtcaagctgggcactaaggcactggctggtcaatggctggcttacggtgttactcgcagtgtgactaagcgttcagtcatgacgctggcttacgggtccaaagagttcggcttccgtcaacaagtgctggaagatactattcagtgggctattgattccggcaagggtctgatgttcactcagccgaatcaggctgctggatacatggctaagctgatttgggaatctgtgagcgtgacggtggtagctgcggttgaagcaatgaactggcttaagtctgctgctaagctgctggctgctgaggtcaaagataagaagactggagagattcttcgcaagcgttgcgctgtgcattgggtaactcctgatggtttccctgtgtggcaggaatacaagaagcctattcagacgcgcttgaacctgatgttcctcggtcagttccgcttacagcctaccattaacaccaacaaagatagcgagattgatgcacacaaacaggagtctggtatcgctcctaactttgtacacagccaagacggtagccaccttcgtaagactgtagtgtgggcacacgagaagtacggaatcgaatcttttgcactgattcacgactccttcggtaccattccggctgacgctgcgaacctgttcaaagcagtgcgcgaaactatggttgacacatatgagtcttgtgatgtactggctgatttctacgaccagttcgctgaccagttgcacgagtctcaattggacaaaatgccagcacttccggctaaaggtaacttgaacctccgtgacatcttagagtcggacttcgcgttcgcg

SEQ ID NO: 14 - protein, 890 aa, synthetic construct
  REGION 1..890: note = Variant of RNA polymerase
MHHHHHHMNTINIAKNDFSDIELAAIPFNTLADHYGERLAREQLALEHESYEMGEARFRKMFERQLKAGEVADNAAAKPLITTLLPKMIARINDWFEEVKAKRGKRPTAFQFLQEIKPEAVAYITIKTTLACLTSADNTTVQAVASAIGRAIEDEARFGRIRDLEAKHFKKNVEEQLNKRVGHVYKKAFMQVVEADMLSKGLLGGEAWSSWHKEDSIHVGVRCIEMLIESTGMVSLHRQNAGVVGQDSETIELAPEYAEAIATRAGALAGISPMFQPCVVPPKPWTGITGGGYWANGRRPLALVRTHSKKALMRYEDVYMPEVYKAINIAQNTAWMINKKVLAVANVITKWKHCPVRDIPAIEREELPMKPEDIDMNPEALTAWKRAAAAVYRRDKARKSVRIYLEFMLEQANKFANHKAIWFPYNMDWRGRVYAVSMFNPQGNDMTKGLLTLAKGKPIGKEGYYWLKIHGANCAGVDKVPFPERIKFIEENHENIMACAKSPLENTWWVEQDLPFCFLAFCFEYAGVQHHGLSYNCSLPLAFDGSCSGIQHFSAMLRDEVGGRAVNLLPSETVQDIYGIVAKKVNEILQADAINGTDNEVVTVTDENTGEISEKVKLGTKALAGQWLAYGVTRSVTKRSVMTLAYGSKEFGFRQQVLEDTIQWAIDSGKGLMFTQPNQAAGYMAKLIWESVSVTVVAAVEAMNWLKSAAKLLAAEVKDKKTGEILRKRCAVHWVTPDGFPVWQEYKKPIQTRLNLMFLGQFRLQPTINTNKDSEIDAHKQESGIAPNFVHSQDGSHLRKTVVWAHEKYGIESFALIHDSFGTIPADAANLFKAVRETMVDTYESCDVLADFYDQFADQLHESQLDKMPALPAKGNLNLRDILESDFAFA

SEQ ID NO: 15 - DNA, 2670 bp, synthetic construct
  misc_feature 1..2670: note = Variant of RNA polymerase
  source 1..2670: mol_type = other DNA
atgcaccatcaccatcaccatatgaacacgattaacatcgctaagaacgacttctctgacatcgaactggctgctatcccgttcaacactctggctgaccattacggtgagcgtttagctcgcgaacagttggcccttgagcatgagtcttacgagatgggtgaagcacgcttccgcaagatgtttgagcgtcaacttaaagctggtgaggttgcggataacgctgccgccaagcctctcatcactaccctactccctaagatgattgcacgcatcaacgactggtttgaggaagtgaaagctaagcgcggcaagcgcccgacagccttccagttcctgcaagaaatcaagccggaagccgtagcgtacatcaccattaagaccactctggcttgcctaaccagtgcggacaatacaaccgttcaggctgtagcaagcgcaatcggtcgggccattgaggacgaggctcgcttcggtcgtatccgtgaccttgaagctaagcacttcaagaaaaacgttgaggaacaactcaacaagcgcgtagggcacgtctacaagaaagcatttatgcaagttgtcgaggctgacatgctctctaagggtctactcggtggcgaggcgtggtcttcgtggcataaggaagactctattcatgtaggagtacgctgcatcgagatgctcattgagtcaaccggaatggttagcttacaccgccaaaatgctggcgtagtaggtcaagactctgagactatcgaactcgcacctgaatacgctgaggctatcgcaacccgtgcaggtgcgctggctggcatctctccgatgttccaaccttgcgtagttcctcctaagccgtggactggcattactggtggtggctattgggctaacggtcgtcgtcctctggcgctggtgcgtactcacagtaagaaagcactgatgcgctacgaagacgtttacatgcctgaggtgtacaaagcgattaacattgcgcaaaacaccgcatggctgatcaacaagaaagtcctagcggtcgccaacgtaatcaccaagtggaagcattgtccggtccgggacatccctgcgattgagcgtgaagaactcccgatgaaaccggaagacatcgacatgaatcctgaggctctcaccgcgtggaaacgtgctgccgctgctgtgtaccgcagagacaaggctcgcaagtctgttcgtatctatcttgagttcatgcttgagcaagccaataagtttgctaaccataaggccatctggttcccttacaacatggactggcgcggtcgtgtttacgctgtgtcaatgttcaacccgcaaggtaacgatatgaccaaaggactgcttacgctggcgaaaggtaaaccaatcggtaaggaaggttactactggctgaaaatccacggtgcaaactgtgcgggtgtcgataaggttccgttccctgagcgcatcaagttcattgaggaaaaccacgagaacatcatggcttgcgctaagtctccactggagaacacttggtgggctgagcaagatctcccgttctgcttccttgcgttctgctttgagtacgctggggtacagcaccacggcctgagctataactgctcccttccgctggcgtttgacgggtcttgctctggcatccagcacttctccgcgatgctccgagatgaggtaggtggtcgcgcggttaacttgcttcctagtgaaaccgttcaggacatctacgggattgttgctaagaaagtcaacgagattctacaagcagacgcaatcaatgggaccgataacgaagtagttaccgtgaccgatgagaacactggtgaaatctctgagaaagtcaagctgggcactaaggcactggctggtcaatggctggcttacggtgttactcgcagtgtgactaagcgttcagtcatgacgctggcttacgggtccaaagagttcggcttccgtcaacaagtgctggaagatactattcagtgggctattgattccggcaagggtctgatgttcactcagccgaatcaggctgctggatacatggctaagctgatttgggaatctgtgagcgtgacggtggtagctgcggttgaagcaatgaactggcttaagtctgctgctaagctgctggctgctgaggtcaaagataagaagactggagagattcttcgcaagcgttgcgctgtgcattgggtaactcctgatggtttccctgtgtggcaggaatacaagaagcctattcagacgcgcttgaacctgatgttcctcggtcagttccgcttacagcctaccattaacaccaacaaagatagcgagattgatgcacacaaacaggagtctggtatcgctcctaactttgtacacagccaagacggtagccaccttcgtaagactgtagtgtgggcacacgagaagtacggaatcgaatcttttgcactgattcacgactccttcggtaccattccggctgacgctgcgaacctgttcaaagcagtgcgcgaaactatggttgacacatatgagtcttgtgatgtactggctgatttctacgaccagttcgctgaccagttgcacgagtctcaattggacaaaatgccagcacttccggctaaaggtaacttgaacctccgtgacatcttagagtcggacttcgcgttcgcg

SEQ ID NO: 16 - protein, 890 aa, synthetic construct
  REGION 1..890: note = Variant of RNA polymerase
MHHHHHHMNTINIAKNDFSDIELAAIPFNTLADHYGERLAREQLALEHESYEMGEARFRKMFERQLKAGEVADNAAAKPLITTLLPKMIARINDWFEEVKAKRGKRPTAFQFLQEIKPEAVAYITIKTTLACLTSADNTTVQAVASAIGRAIEDEARFGRIRDLEAKHFKKNVEEQLNKRVGHVYKKAFMQVVEADMLSKGLLGGEAWSSWHKEDSIHVGVRCIEMLIESTGMVSLHRQNAGVVGQDSETIELAPEYAEAIATRAGALAGISPMFQPCVVPPKPWTGITGGGYWANGRRPLALVRTHSKKALMRYEDVYMPEVYKAINIAQNTAWLINKKVLAVANVITKWKHCPVRDIPAIEREELPMKPEDIDMNPEALTAWKRAAAAVYRRDKARKSVRIYLEFMLEQANKFANHKAIWFPYNMDWRGRVYAVSMFNPQGNDMTKGLLTLAKGKPIGKEGYYWLKIHGANCAGVDKVPFPERIKFIEENHENIMACAKSPLENTWWAEQDLPFCFLAFCFEYAGVQHHGLSYNCSLPLAFDGSCSGIQHFSAMLRDEVGGRAVNLLPSETVQDIYGIVAKKVNEILQADAINGTDNEVVTVTDENTGEISEKVKLGTKALAGQWLAYGVTRSVTKRSVMTLAYGSKEFGFRQQVLEDTIQWAIDSGKGLMFTQPNQAAGYMAKLIWESVSVTVVAAVEAMNWLKSAAKLLAAEVKDKKTGEILRKRCAVHWVTPDGFPVWQEYKKPIQTRLNLMFLGQFRLQPTINTNKDSEIDAHKQESGIAPNFVHSQDGSHLRKTVVWAHEKYGIESFALIHDSFGTIPADAANLFKAVRETMVDTYESCDVLADFYDQFADQLHESQLDKMPALPAKGNLNLRDILESDFAFA

SEQ ID NO: 17 - DNA, 2670 bp, synthetic construct
  misc_feature 1..2670: note = Variant of RNA polymerase
  source 1..2670: mol_type = other DNA
atgcaccatcaccatcaccatatgaacacgattaacatcgctaagaacgacttctctgacatcgaactggctgctatcccgttcaacactctggctgaccattacggtgagcgtttagctcgcgaacagttggcccttgagcatgagtcttacgagatgggtgaagcacgcttccgcaagatgtttgagcgtcaacttaaagctggtgaggttgcggataacgctgccgccaagcctctcatcactaccctactccctaagatgattgcacgcatcaacgactggtttgaggaagtgaaagctaagcgcggcaagcgcccgacagccttccagttcctgcaagaaatcaagccggaagccgtagcgtacatcaccattaagaccactctggcttgcctaaccagtgcggacaatacaaccgttcaggctgtagcaagcgcaatcggtcgggccattgaggacgaggctcgcttcggtcgtatccgtgaccttgaagctaagcacttcaagaaaaacgttgaggaacaactcaacaagcgcgtagggcacgtctacaagaaagcatttatgcaagttgtcgaggctgacatgctctctaagggtctactcggtggcgaggcgtggtcttcgtggcataaggaagactctattcatgtaggagtacgctgcatcgagatgctcattgagtcaaccggaatggttagcttacaccgccaaaatgctggcgtagtaggtcaagactctgagactatcgaactcgcacctgaatacgctgaggctatcgcaacccgtgcaggtgcgctggctggcatctctccgatgttccaaccttgcgtagttcctcctaagccgtggactggcattactggtggtggctattgggctaacggtcgtcgtcctctggcgctggtgcgtactcacagtaagaaagcactgatgcgctacgaagacgtttacatgcctgaggtgtacaaagcgattaacattgcgcaaaacaccgcatggaaaatcaacaagaaagtcctagcggtcgccaacgtaatcaccaagtggaagcattgtccggtccgggacatccctgcgattgagcgtgaagaactcccgatgaaaccggaagacatcgacatgaatcctgaggctctcaccgcgtggaaacgtgctaaggctgctgtgtaccgcagagacaaggctcgcaagtctgttcgtatctatcttgagttcatgcttgagcaagccaataagtttgctaaccataaggccatctggttcccttacaacatggactggcgcggtcgtgtttacgctgtgtcaatgttcaacccgcaaggtaacgatatgaccaaaggactgcttacgctggcgaaaggtaaaccaatcggtaaggaaggttactactggctgaaaatccacggtgcaaactgtgcgggtgtcgataaggttccgttccctgagcgcatcaagttcattgaggaaaaccacgagaacatcatggcttgcgctaagtctccactggagaacacttggtgggctgagcaagatctcccgttctgcttccttgcgttctgctttgagtacgctggggtacagcaccacggcctgagctataactgctcccttccgctggcgtttgacgggtcttgctctggcatccagcacttctccgcgatgctccgagatgaggtaggtggtcgcgcggttaacttgcttcctagtgaaaccgttcaggacatctacgggattgttgctaagaaagtcaacgagattctacaagcagacgcaatcaatgggaccgataacgaagtagttaccgtgaccgatgagaacactggtgaaatctctgagaaagtcaagctgggcactaaggcactggctggtcaatggctggcttacggtgttactcgcagtgtgactaagcgttcagtcatgacgctggcttacgggtccaaagagttcggcttccgtcaacaagtgctggaagatactattcagtgggctattgattccggcaagggtctgatgttcactcagccgaatcaggctgctggatacatggctaagctgatttgggaatctgtgagcgtgacggtggtagctgcggttgaagcaatgaactggcttaagtctgctgctaagctgctggctgctgaggtcaaagataagaagactggagagattcttcgcaagcgttgcgctgtgcattgggtaactcctgatggtttccctgtgtggcaggaatacaagaagcctattcagacgcgcttgaacctgatgttcctcggtcagttccgcttacagcctaccattaacaccaacaaagatagcgagattgatgcacacaaacaggagtctggtatcgctcctaactttgtacacagccaagacggtagccaccttcgtaagactgtagtgtgggcacacgagaagtacggaatcgaatcttttgcactgattcacgactccttcggtaccattccggctgacgctgcgaacctgttcaaagcagtgcgcgaaactatggttgacacatatgagtcttgtgatgtactggctgatttctacgaccagttcgctgaccagttgcacgagtctcaattggacaaaatgccagcacttccggctaaaggtaacttgaacctccgtgacatcttagagtcggacttcgcgttcgcg

SEQ ID NO: 18 - protein, 890 aa, synthetic construct
  REGION 1..890: note = Variant of RNA polymerase
MHHHHHHMNTINIAKNDFSDIELAAIPFNTLADHYGERLAREQLALEHESYEMGEARFRKMFERQLKAGEVADNAAAKPLITTLLPKMIARINDWFEEVKAKRGKRPTAFQFLQEIKPEAVAYITIKTTLACLTSADNTTVQAVASAIGRAIEDEARFGRIRDLEAKHFKKNVEEQLNKRVGHVYKKAFMQVVEADMLSKGLLGGEAWSSWHKEDSIHVGVRCIEMLIESTGMVSLHRQNAGVVGQDSETIELAPEYAEAIATRAGALAGISPMFQPCVVPPKPWTGITGGGYWANGRRPLALVRTHSKKALMRYEDVYMPEVYKAINIAQNTAWKINKKVLAVANVITKWKHCPVRDIPAIEREELPMKPEDIDMNPEALTAWKRAKAAVYRRDKARKSVRIYLEFMLEQANKFANHKAIWFPYNMDWRGRVYAVSMFNPQGNDMTKGLLTLAKGKPIGKEGYYWLKIHGANCAGVDKVPFPERIKFIEENHENIMACAKSPLENTWWAEQDLPFCFLAFCFEYAGVQHHGLSYNCSLPLAFDGSCSGIQHFSAMLRDEVGGRAVNLLPSETVQDIYGIVAKKVNEILQADAINGTDNEVVTVTDENTGEISEKVKLGTKALAGQWLAYGVTRSVTKRSVMTLAYGSKEFGFRQQVLEDTIQWAIDSGKGLMFTQPNQAAGYMAKLIWESVSVTVVAAVEAMNWLKSAAKLLAAEVKDKKTGEILRKRCAVHWVTPDGFPVWQEYKKPIQTRLNLMFLGQFRLQPTINTNKDSEIDAHKQESGIAPNFVHSQDGSHLRKTVVWAHEKYGIESFALIHDSFGTIPADAANLFKAVRETMVDTYESCDVLADFYDQFADQLHESQLDKMPALPAKGNLNLRDILESDFAFA

SEQ ID NO: 19 - DNA, 2670 bp, synthetic construct
  misc_feature 1..2670: note = Variant of RNA polymerase
  source 1..2670: mol_type = other DNA
atgcaccatcaccatcaccatatgaacacgattaacatcgctaagaacgacttctctgacatcgaactggctgctatcccgttcaacactctggctgaccattacggtgagcgtttagctcgcgaacagttggcccttgagcatgagtcttacgagatgggtgaagcacgcttccgcaagatgtttgagcgtcaacttaaagctggtgaggttgcggataacgctgccgccaagcctctcatcactaccctactccctaagatgattgcacgcatcaacgactggtttgaggaagtgaaagctaagcgcggcaagcgcccgacagccttccagttcctgcaagaaatcaagccggaagccgtagcgtacatcaccattaagaccactctggcttgcctaaccagtgcggacaatacaaccgttcaggctgtagcaagcgcaatcggtcgggccattgaggacgaggctcgcttcggtcgtatccgtgaccttgaagctaagcacttcaagaaaaacgttgaggaacaactcaacaagcgcgtagggcacgtctacaagaaagcatttatgcaagttgtcgaggctgacatgctctctaagggtctactcggtggcgaggcgtggtcttcgtggcataaggaagactctattcatgtaggagtacgctgcatcgagatgctcattgagtcaaccggaatggttagcttacaccgccaaaatgctggcgtagtaggtcaagactctgagactatcgaactcgcacctgaatacgctgaggctatcgcaacccgtgcaggtgcgctggctggcatctctccgatgttccaaccttgcgtagttcctcctaagccgtggactggcattactggtggtggctattgggctaacggtcgtcgtcctctggcgctggtgcgtactcacagtaagaaagcactgatgcgctacgaagacgtttacatgcctgaggtgtacaaagcgattaacattgcgcaaaacaccgcatggaaaatcaacaaggaggtcctagcggtcgccaacgtaatcaccaagtggaagcattgtccggtccgggacatccctgcgattgagcgtgaagaactcccgatgaaaccggaagacatcgacatgaatcctgaggctctcaccgcgtggaaacgtgctgccgctgctgtgtaccgcagagacaaggctcgcaagtctgttcgtatctatcttgagttcatgcttgagcaagccaataagtttgctaaccataaggccatctggttcccttacaacatggactggcgcggtcgtgtttacgctgtgtcaatgttcaacccgcaaggtaacgatatgaccaaaggactgcttacgctggcgaaaggtaaaccaatcggtaaggaaggttactactggctgaaaatccacggtgcaaactgtgcgggtgtcgataaggttccgttccctgagcgcatcaagttcattgaggaaaaccacgagaacatcatggcttgcgctaagtctccactggagaacacttggtgggctgagcaagatctcccgttctgcttccttgcgttctgctttgagtacgctggggtacagcaccacggcctgagctataactgctcccttccgctggcgtttgacgggtcttgctctggcatccagcacttctccgcgatgctccgagatgaggtaggtggtcgcgcggttaacttgcttcctagtgaaaccgttcaggacatctacgggattgttgctaagaaagtcaacgagattctacaagcagacgcaatcaatgggaccgataacgaagtagttaccgtgaccgatgagaacactggtgaaatctctgagaaagtcaagctgggcactaaggcactggctggtcaatggctggcttacggtgttactcgcagtgtgactaagcgttcagtcatgacgctggcttacgggtccaaagagttcggcttccgtcaacaagtgctggaagatactattcagtgggctattgattccggcaagggtctgatgttcactcagccgaatcaggctgctggatacatggctaagctgatttgggaatctgtgagcgtgacggtggtagctgcggttgaagcaatgaactggcttaagtctgctgctaagctgctggctgctgaggtcaaagataagaagactggagagattcttcgcaagcgttgcgctgtgcattgggtaactcctgatggtttccctgtgtggcaggaatacaagaagcctattcagacgcgcttgaacctgatgttcctcggtcagttccgcttacagcctaccattaacaccaacaaagatagcgagattgatgcacacaaacaggagtctggtatcgctcctaactttgtacacagccaagacggtagccaccttcgtaagactgtagtgtgggcacacgagaagtacggaatcgaatcttttgcactgattcacgactccttcggtaccattccggctgacgctgcgaacctgttcaaagcagtgcgcgaaactatggttgacacatatgagtcttgtgatgtactggctgatttctacgaccagttcgctgaccagttgcacgagtctcaattggacaaaatgccagcacttccggctaaaggtaacttgaacctccgtgacatcttagagtcggacttcgcgttcgcg

SEQ ID NO: 20 - protein, 890 aa, synthetic construct
  REGION 1..890: note = Variant of RNA polymerase
MHHHHHHMNTINIAKNDFSDIELAAIPFNTLADHYGERLAREQLALEHESYEMGEARFRKMFERQLKAGEVADNAAAKPLITTLLPKMIARINDWFEEVKAKRGKRPTAFQFLQEIKPEAVAYITIKTTLACLTSADNTTVQAVASAIGRAIEDEARFGRIRDLEAKHFKKNVEEQLNKRVGHVYKKAFMQVVEADMLSKGLLGGEAWSSWHKEDSIHVGVRCIEMLIESTGMVSLHRQNAGVVGQDSETIELAPEYAEAIATRAGALAGISPMFQPCVVPPKPWTGITGGGYWANGRRPLALVRTHSKKALMRYEDVYMPEVYKAINIAQNTAWKINKEVLAVANVITKWKHCPVRDIPAIEREELPMKPEDIDMNPEALTAWKRAAAAVYRRDKARKSVRIYLEFMLEQANKFANHKAIWFPYNMDWRGRVYAVSMFNPQGNDMTKGLLTLAKGKPIGKEGYYWLKIHGANCAGVDKVPFPERIKFIEENHENIMACAKSPLENTWWAEQDLPFCFLAFCFEYAGVQHHGLSYNCSLPLAFDGSCSGIQHFSAMLRDEVGGRAVNLLPSETVQDIYGIVAKKVNEILQADAINGTDNEVVTVTDENTGEISEKVKLGTKALAGQWLAYGVTRSVTKRSVMTLAYGSKEFGFRQQVLEDTIQWAIDSGKGLMFTQPNQAAGYMAKLIWESVSVTVVAAVEAMNWLKSAAKLLAAEVKDKKTGEILRKRCAVHWVTPDGFPVWQEYKKPIQTRLNLMFLGQFRLQPTINTNKDSEIDAHKQESGIAPNFVHSQDGSHLRKTVVWAHEKYGIESFALIHDSFGTIPADAANLFKAVRETMVDTYESCDVLADFYDQFADQLHESQLDKMPALPAKGNLNLRDILESDFAFA

SEQ ID NO: 21 - DNA, 2670 bp, synthetic construct
  misc_feature 1..2670: note = Variant of RNA polymerase
  source 1..2670: mol_type = other DNA
atgcaccatcaccatcaccatatgaacacgattaacatcgctaagaacgacttctctgacatcgaactggctgctatcccgttcaacactctggctgaccattacggtgagcgtttagctcgcgaacagttggcccttgagcatgagtcttacgagatgggtgaagcacgcttccgcaagatgtttgagcgtcaacttaaagctggtgaggttgcggataacgctgccgccaagcctctcatcactaccctactccctaagatgattgcacgcatcaacgactggtttgaggaagtgaaagctaagcgcggcaagcgcccgacagccttccagttcctgcaagaaatcaagccggaagccgtagcgtacatcaccattaagaccactctggcttgcctaaccagtgcggacaatacaaccgttcaggctgtagcaagcgcaatcggtcgggccattgaggacgaggctcgcttcggtcgtatccgtgaccttgaagctaagcacttcaagaaaaacgttgaggaacaactcaacaagcgcgtagggcacgtctacaagaaagcatttatgcaagttgtcgaggctgacatgctctctaagggtctactcggtggcgaggcgtggtcttcgtggcataaggaagactctattcatgtaggagtacgctgcatcgagatgctcattgagtcaaccggaatggttagcttacaccgccaaaatgctggcgtagtaggtcaagactctgagactatcgaactcgcacctgaatacgctgaggctatcgcaacccgtgcaggtgcgctggctggcatctctccgatgttccaaccttgcgtagttcctcctaagccgtggactggcattactggtggtggctattgggctaacggtcgtcgtcctctggcgctggtgcgtactcacagtaagaaagcactgatgcgctacgaagacgtttacatgcctgaggtgtacaaagcgattaacattgcgcaaaacaccgcatggaaaatcaacaagaaagtcctagcggtcgccaacgtaatcaccaagtggaagcattgtccggtccgggacatccctgcgattgagcgtgaagaactcccgatgaaaccggaagacatcgacatgaatcctgaggctctcaccgcgtggaaacgtgctgccgctgctgtgtaccgcagagacaaggctcgcaagtctcgcactatcagccttgagttcatgcttgagcaagccaataagtttgctaaccataaggccatctggttcccttacaacatggactggcgcggtcgtgtttacgctgtgtcaatgttcaacccgcaaggtaacgatatgaccaaaggactgcttacgctggcgaaaggtaaaccaatcggtaaggaaggttactactggctgaaaatccacggtgcaaactgtgcgggtgtcgataaggttccgttccctgagcgcatcaagttcattgaggaaaaccacgagaacatcatggcttgcgctaagtctccactggagaacacttggtgggctgagcaagatctcccgttctgcttccttgcgttctgctttgagtacgctggggtacagcaccacggcctgagctataactgctcccttccgctggcgtttgacgggtcttgctctggcatccagcacttctccgcgatgctccgagatgaggtaggtggtcgcgcggttaacttgcttcctagtgaaaccgttcaggacatctacgggattgttgctaagaaagtcaacgagattctacaagcagacgcaatcaatgggaccgataacgaagtagttaccgtgaccgatgagaacactggtgaaatctctgagaaagtcaagctgggcactaaggcactggctggtcaatggctggcttacggtgttactcgcagtgtgactaagcgttcagtcatgacgctggcttacgggtccaaagagttcggcttccgtcaacaagtgctggaagatactattcagtgggctattgattccggcaagggtctgatgttcactcagccgaatcaggctgctggatacatggctaagctgatttgggaatctgtgagcgtgacggtggtagctgcggttgaagcaatgaactggcttaagtctgctgctaagctgctggctgctgaggtcaaagataagaagactggagagattcttcgcaagcgttgcgctgtgcattgggtaactcctgatggtttccctgtgtggcaggaatacaagaagcctattcagacgcgcttgaacctgatgttcctcggtcagttccgcttacagcctaccattaacaccaacaaagatagcgagattgatgcacacaaacaggagtctggtatcgctcctaactttgtacacagccaagacggtagccaccttcgtaagactgtagtgtgggcacacgagaagtacggaatcgaatcttttgcactgattcacgactccttcggtaccattccggctgacgctgcgaacctgttcaaagcagtgcgcgaaactatggttgacacatatgagtcttgtgatgtactggctgatttctacgaccagttcgctgaccagttgcacgagtctcaattggacaaaatgccagcacttccggctaaaggtaacttgaacctccgtgacatcttagagtcggacttcgcgttcgcg

SEQ ID NO: 22 - protein, 890 aa, synthetic construct
  REGION 1..890: note = Variant of RNA polymerase
MHHHHHHMNTINIAKNDFSDIELAAIPFNTLADHYGERLAREQLALEHESYEMGEARFRKMFERQLKAGEVADNAAAKPLITTLLPKMIARINDWFEEVKAKRGKRPTAFQFLQEIKPEAVAYITIKTTLACLTSADNTTVQAVASAIGRAIEDEARFGRIRDLEAKHFKKNVEEQLNKRVGHVYKKAFMQVVEADMLSKGLLGGEAWSSWHKEDSIHVGVRCIEMLIESTGMVSLHRQNAGVVGQDSETIELAPEYAEAIATRAGALAGISPMFQPCVVPPKPWTGITGGGYWANGRRPLALVRTHSKKALMRYEDVYMPEVYKAINIAQNTAWKINKKVLAVANVITKWKHCPVRDIPAIEREELPMKPEDIDMNPEALTAWKRAAAAVYRRDKARKSRTISLEFMLEQANKFANHKAIWFPYNMDWRGRVYAVSMFNPQGNDMTKGLLTLAKGKPIGKEGYYWLKIHGANCAGVDKVPFPERIKFIEENHENIMACAKSPLENTWWAEQDLPFCFLAFCFEYAGVQHHGLSYNCSLPLAFDGSCSGIQHFSAMLRDEVGGRAVNLLPSETVQDIYGIVAKKVNEILQADAINGTDNEVVTVTDENTGEISEKVKLGTKALAGQWLAYGVTRSVTKRSVMTLAYGSKEFGFRQQVLEDTIQWAIDSGKGLMFTQPNQAAGYMAKLIWESVSVTVVAAVEAMNWLKSAAKLLAAEVKDKKTGEILRKRCAVHWVTPDGFPVWQEYKKPIQTRLNLMFLGQFRLQPTINTNKDSEIDAHKQESGIAPNFVHSQDGSHLRKTVVWAHEKYGIESFALIHDSFGTIPADAANLFKAVRETMVDTYESCDVLADFYDQFADQLHESQLDKMPALPAKGNLNLRDILESDFAFA

SEQ ID NO: 23 - DNA, 2670 bp, synthetic construct
  misc_feature 1..2670: note = Variant of RNA polymerase
  source 1..2670: mol_type = other DNA
atgcaccatcaccatcaccatatgaacacgattaacatcgctaagaacgacttctctgacatcgaactggctgctatcccattcaacactctggctgaccattacggtgagcgtttagctcgcgaacagttggcccttgagcatgagtcttacgagatgggtgaagcacgcttccgcaagatgtttgagcgtcaacttaaagctggtgaggttgcggataacgctgccgccaagcctctcatcactaccctactccctaagatgattgcacgcatcaacgactggtttgaggaagtgaaagctaagcgcggcaagcgcccgacagccttccagttcctgcaagaaatcaagccggaagccgtagcgtacatcaccattaagaccactctggcttgcctaaccagtgcggacaatacaaccgttcaggctgtagcaagcgcaatcggtcgggccattgaggacgaggctcgcttcggtcgtatccgtgaccttgaagctaagcacttcaagaaaaacgttgaggaacaactcaacaagcgcgtagggcacgtctacaagaaagcatttatgcaagttgtcgaggctgacatgctctctaagggtctactcggtggcgaggcgtggtcttcgtggcataaggaagactctattcatgtaggagtacgctgcatcgagatgctcattgagtcaaccggaatggttagcttacaccgccaaaatgctggcgtagtaggtcaagactctgagactatcgaactcgcacctgaatacgctgaggctatcgcaacccgtgcaggtgcgctggctggcatctctccgatgttccaaccttgcgtagttcctcctaagccgtggactggcattactggtggtggctattgggctaacggtcgtcgtcctctggcgctggtgcgtactcacagtaagaaagcactgatgcgctacgaagacgtttacatgcctgaggtgtacaaagcgattaacattgcgcaaaacaccgcatggaaaatcaacaagaaagtcctagcggtcgccaacgtaatcaccaagcttaagcattgtccggtcgaggacatccctgcgattgagcgtgaagaactcccgatgaaaccggaagacatcgacatgaatcctgaggctctcaccgcgtggaaacgtgctgccgctgctgtgtaccgcagagacaaggctcgcaagtctgttcgtatctatcttgagttcatgcttgagcaagccaataagtttgctaaccataaggccatctggttcccttacaacatggactggcgcggtcgtgtttacgctgtgtcaatgttcaacccgcaaggtaacgatatgaccaaaggactgcttacgctggcgaaaggtaaaccaatcggtaaggaaggttactactggctgaaaatccacggtgcaaactgtgcgggtgtcgataaggttccgttccctgagcgcatcaagttcattgaggaaaaccacgagaacatcatggcttgcgctaagtctccactggagaacacttggtgggctgagcaagatctcccgttctgcttccttgcgttctgctttgagtacgctggggtacagcaccacggcctgagctataactgctcccttccgctggcgtttgacgggtcttgctctggcatccagcacttctccgcgatgctccgagatgaggtaggtggtcgcgcggttaacttgcttcctagtgaaaccgttcaggacatctacgggattgttgctaagaaagtcaacgagattctacaagcagacgcaatcaatgggaccgataacgaagtagttaccgtgaccgatgagaacactggtgaaatctctgagaaagtcaagctgggcactaaggcactggctggtcaatggctggcttacggtgttactcgcagtgtgactaagcgttcagtcatgacgctggcttacgggtccaaagagttcggcttccgtcaacaagtgctggaagatactattcagtgggctattgattccggcaagggtctgatgttcactcagccgaatcaggctgctggatacatggctaagctgatttgggaatctgtgagcgtgacggtggtagctgcggttgaagcaatgaactggcttaagtctgctgctaagctgctggctgctgaggtcaaagataagaagactggagagattcttcgcaagcgttgcgctgtgcattgggtaactcctgatggtttccctgtgtggcaggaatacaagaagcctattcagacgcgcttgaacctgatgttcctcggtcagttccgcttacagcctaccattaacaccaacaaagatagcgagattgatgcacacaaacaggagtctggtatcgctcctaactttgtacacagccaagacggtagccaccttcgtaagactgtagtgtgggcacacgagaagtacggaatcgaatcttttgcactgattcacgactccttcggtaccattccggctgacgctgcgaacctgttcaaagcagtgcgcgaaactatggttgacacatatgagtcttgtgatgtactggctgatttctacgaccagttcgctgaccagttgcacgagtctcaattggacaaaatgccagcacttccggctaaaggtaacttgaacctccgtgacatcttagagtcggacttcgcgttcgcg

SEQ ID NO: 24 - protein, 890 aa, synthetic construct
  REGION 1..890: note = Variant of RNA polymerase
MHHHHHHMNTINIAKNDFSDIELAAIPFNTLADHYGERLAREQLALEHESYEMGEARFRKMFERQLKAGEVADNAAAKPLITTLLPKMIARINDWFEEVKAKRGKRPTAFQFLQEIKPEAVAYITIKTTLACLTSADNTTVQAVASAIGRAIEDEARFGRIRDLEAKHFKKNVEEQLNKRVGHVYKKAFMQVVEADMLSKGLLGGEAWSSWHKEDSIHVGVRCIEMLIESTGMVSLHRQNAGVVGQDSETIELAPEYAEAIATRAGALAGISPMFQPCVVPPKPWTGITGGGYWANGRRPLALVRTHSKKALMRYEDVYMPEVYKAINIAQNTAWKINKKVLAVANVITKLKHCPVEDIPAIEREELPMKPEDIDMNPEALTAWKRAAAAVYRRDKARKSVRIYLEFMLEQANKFANHKAIWFPYNMDWRGRVYAVSMFNPQGNDMTKGLLTLAKGKPIGKEGYYWLKIHGANCAGVDKVPFPERIKFIEENHENIMACAKSPLENTWWAEQDLPFCFLAFCFEYAGVQHHGLSYNCSLPLAFDGSCSGIQHFSAMLRDEVGGRAVNLLPSETVQDIYGIVAKKVNEILQADAINGTDNEVVTVTDENTGEISEKVKLGTKALAGQWLAYGVTRSVTKRSVMTLAYGSKEFGFRQQVLEDTIQWAIDSGKGLMFTQPNQAAGYMAKLIWESVSVTVVAAVEAMNWLKSAAKLLAAEVKDKKTGEILRKRCAVHWVTPDGFPVWQEYKKPIQTRLNLMFLGQFRLQPTINTNKDSEIDAHKQESGIAPNFVHSQDGSHLRKTVVWAHEKYGIESFALIHDSFGTIPADAANLFKAVRETMVDTYESCDVLADFYDQFADQLHESQLDKMPALPAKGNLNLRDILESDFAFA

SEQ ID NO: 25 - DNA, 2670 bp, synthetic construct
  misc_feature 1..2670: note = Variant of RNA polymerase
  source 1..2670: mol_type = other DNA
atgcaccatcaccatcaccatatgaacacgattaacatcgctaagaacgacttctctgacatcgaactggctgctatcccgttcaacactctggctgaccattacggtgagcgtttagctcgcgaacagttggcccttgagcatgagtcttacgagatgggtgaagcacgcttccgcaagatgtttgagcgtcaacttaaagctggtgaggttgcggataacgctgccgccaagcctctcatcactaccctactccctaagatgattgcacgcatcaacgactggtttgaggaagtgaaagctaagcgcggcaagcgcccgacagccttccagttcctgcaagaaatcaagccggaagccgtagcgtacatcaccattaagaccactctggcttgcctaaccagtgcggacaatacaaccgttcaggctgtagcaagcgcaatcggtcgggccattgaggacgaggctcgcttcggtcgtatccgtgaccttgaagctaagcacttcaagaaaaacgttgaggaacaactcaacaagcgcgtagggcacgtctacaagaaagcatttatgcaagttgtcgaggctgacatgctctctaagggtctactcggtggcgaggcgtggtcttcgtggcataaggaagactctattcatgtaggagtacgctgcatcgagatgctcattgagtcaaccggaatggttagcttacaccgccaaaatgctggcgtagtaggtcaagactctgagactatcgaactcgcacctgaatacgctgaggctatcgcaacccgtgcaggtgcgctggctggcatctctccgatgttccaaccttgcgtagttcctcctaagccgtggactggcattactggtggtggctattgggctaacggtcgtcgtcctctggcgctggtgcgtactcacagtaagaaagcactgatgcgctacgaagacgtttacatgcctgaggtgtacaaagcgattaacattgcgcaaaacaccgcatggaaaatcaacaagaaagtcctagcggtcgccaacgtaatcaccaagtggaagcattgtccggtccgggacatccctgcgattgagcgtgaagaactcccgatgaaaccggaagacatcgacatgaatcctgaggctctcaccgcgtggaaacgtgctgccgctgctgtgtaccgcagagacaaggctcgcaagtctcgccgtatcattcttgagttcatgcttgagcaagccaataagtttgctaaccataaggccatctggttcccttacaacatggactggcgcggtcgtgtttacgctgtgtcaatgttcaacccgcaaggtaacgatatgaccaaaggactgcttacgctggcgaaaggtaaaccaatcggtaaggaaggttactactggctgaaaatccacggtgcaaactgtgcgggtgtcgataaggttccgttccctgagcgcatcaagttcattgaggaaaaccacgagaacatcatggcttgcgctaagtctccactggagaacacttggtgggctgagcaagatctcccgttctgcttccttgcgttctgctttgagtacgctggggtacagcaccacggcctgagctataactgctcccttccgctggcgtttgacgggtcttgctctggcatccagcacttctccgcgatgctccgagatgaggtaggtggtcgcgcggttaacttgcttcctagtgaaaccgttcaggacatctacgggattgttgctaagaaagtcaacgagattctacaagcagacgcaatcaatgggaccgataacgaagtagttaccgtgaccgatgagaacactggtgaaatctctgagaaagtcaagctgggcactaaggcactggctggtcaatggctggcttacggtgttactcgcagtgtgactaagcgttcagtcatgacgctggcttacgggtccaaagagttcggcttccgtcaacaagtgctggaagatactattcagtgggctattgattccggcaagggtctgatgttcactcagccgaatcaggctgctggatacatggctaagctgatttgggaatctgtgagcgtgacggtggtagctgcggttgaagcaatgaactggcttaagtctgctgctaagctgctggctgctgaggtcaaagataagaagactggagagattcttcgcaagcgttgcgctgtgcattgggtaactcctgatggtttccctgtgtggcaggaatacaagaagcctattcagacgcgcttgaacctgatgttcctcggtcagttccgcttacagcctaccattaacaccaacaaagatagcgagattgatgcacacaaacaggagtctggtatcgctcctaactttgtacacagccaagacggtagccaccttcgtaagactgtagtgtgggcacacgagaagtacggaatcgaatcttttgcactgattcacgactccttcggtaccattccggctgacgctgcgaacctgttcaaagcagtgcgcgaaactatggttgacacatatgagtcttgtgatgtactggctgatttctacgaccagttcgctgaccagttgcacgagtctcaattggacaaaatgccagcacttccggctaaaggtaacttgaacctccgtgacatcttagagtcggacttcgcgttcgcg

SEQ ID NO: 26 - protein, 890 aa, synthetic construct
  REGION 1..890: note = Variant of RNA polymerase
MHHHHHHMNTINIAKNDFSDIELAAIPFNTLADHYGERLAREQLALEHESYEMGEARFRKMFERQLKAGEVADNAAAKPLITTLLPKMIARINDWFEEVKAKRGKRPTAFQFLQEIKPEAVAYITIKTTLACLTSADNTTVQAVASAIGRAIEDEARFGRIRDLEAKHFKKNVEEQLNKRVGHVYKKAFMQVVEADMLSKGLLGGEAWSSWHKEDSIHVGVRCIEMLIESTGMVSLHRQNAGVVGQDSETIELAPEYAEAIATRAGALAGISPMFQPCVVPPKPWTGITGGGYWANGRRPLALVRTHSKKALMRYEDVYMPEVYKAINIAQNTAWKINKKVLAVANVITKWKHCPVRDIPAIEREELPMKPEDIDMNPEALTAWKRAAAAVYRRDKARKSRRIILEFMLEQANKFANHKAIWFPYNMDWRGRVYAVSMFNPQGNDMTKGLLTLAKGKPIGKEGYYWLKIHGANCAGVDKVPFPERIKFIEENHENIMACAKSPLENTWWAEQDLPFCFLAFCFEYAGVQHHGLSYNCSLPLAFDGSCSGIQHFSAMLRDEVGGRAVNLLPSETVQDIYGIVAKKVNEILQADAINGTDNEVVTVTDENTGEISEKVKLGTKALAGQWLAYGVTRSVTKRSVMTLAYGSKEFGFRQQVLEDTIQWAIDSGKGLMFTQPNQAAGYMAKLIWESVSVTVVAAVEAMNWLKSAAKLLAAEVKDKKTGEILRKRCAVHWVTPDGFPVWQEYKKPIQTRLNLMFLGQFRLQPTINTNKDSEIDAHKQESGIAPNFVHSQDGSHLRKTVVWAHEKYGIESFALIHDSFGTIPADAANLFKAVRETMVDTYESCDVLADFYDQFADQLHESQLDKMPALPAKGNLNLRDILESDFAFA

SEQ ID NO: 27 - DNA, 2670 bp, synthetic construct
  misc_feature 1..2670: note = Variant of RNA polymerase
  source 1..2670: mol_type = other DNA
atgcaccatcaccatcaccatatgaacacgattaacatcgctaagaacgacttctctgacatcgaactggctgctatcccgttcaacactctggctgaccattacggtgagcgtttagctcgcgaacagttggcccttgagcatgagtcttacgagatgggtgaagcacgcttccgcaagatgtttgagcgtcaacttaaagctggtgaggttgcggataacgctgccgccaagcctctcatcactaccctactccctaagatgattgcacgcatcaacgactggtttgaggaagtgaaagctaagcgcggcaagcgcccgacagccttccagttcctgcaagaaatcaagccggaagccgtagcgtacatcaccattaagaccactctggcttgcctaaccagtgcggacaacacaaccgttcaggctgtagcaagcgcaatcggtcgggccattgaggacgaggctcgcttcggtcgtatccgtgaccttgaagctaagcacttcaagaaaaacgttgaggaacaactcaacaagcgcgtagggcacgtctacaagaaagcatttatgcaagttgtcgaggctgacatgctctctaagggtctactcggtggcgaggcgtggtcttcgtggcataaggaagactctattcatgtaggagtacgctgcatcgagatgctcattgagtcaaccggaatggttagcttacaccgccaaaatgctggcgtagtaggtcaagactctgagactatcgaactcgcacctgaatacgctgaggctatcgcaacccgtgcaggtgcgctggctggcatctctccgatgttccaaccttgcgtagttcctcctaagccgtggactggcattactggtggtggctattgggctaacggtcgtcgtcctctggcgctggtgcgtactcacagtaagaaaggtctgatgcgctacgaagacgtttacatgcctgaggtgtacaaagcgattaacattgcgcaaaacaccgcatggaaaatcaacaagaaagtcctagcggtcgccaacgtaatcaccaagtggaagcattgtccggtccgtgacatccctgcgattgagcgtgaagaactcccgatgaaaccggaagacatcgacatgaatcctgaggctctcaccgcgtggaaacgtgctaaagctgctgtgtaccgcagagacaaggctcgcaagtctcgtcgtatctatcttgagttcatgcttgagcaagccaataagtttgctaaccataaggccatctggttcccttacaacatggactggcgcggtcgtgtttacgctgtgtcaatgttcaagccgcaaggtaacgatatgaccaaaggactgcttacgctggcgaaaggtaaaccaatcggtaaggaaggttactactggctgaaaatccacggtgcaaactgtgcgggtgtcgataaggttccgttccctgagcgcatcaagttcattgaggaaaaccacgagaacatcatggcttgcgctaagtctccactggagaacacttggtgggctgagcaagatctcccgttctgcttccttgcgttctgctttgagtacgctggggtacagcaccacggcctgagctataactgctcccttccgctggcgtttgacgggtcttgctctggcatccagcacttctccgcgatgctccgagatgaggtaggtggtcgcgcggttaacttgcttcctagtgaaaccgttcaggacatctacgggattgttgctaagaaagtcaacgagattctacaagcagacgcaatcaatgggaccgataacgaagtagttaccgtgaccgatgagaacactggtgaaatctctgagaaagtcaagctgggcactaaggcactggctggtcaatggctggcttacggtgttactcgcagtgtgactaagcgttcagtcatgacgctggcttacgggtccaaagagttcggcttccgtcaacaagtgctggaagatactattcagtgggctattgattccggcaagggtctgatgttcactcagccgaatcaggctgctggatacatggctaagctgatttgggaatctgtgagcgtgacggtggtagctgcggttgaagcaatgaactggcttaagtctgctgctaagctgctggctgctgaggtcaaagataagaagactggagagattcttcgcaagcgttgcgctgtgcattgggtaactcctgatggtttccctgtgtggcaggaatacaagaagcctattcagacgcgcttgaacctgatgttcctcggtcagttccgcttacagcctaccattaacaccaacaaagatagcgagattgatgcacacaaacaggagtctggtatcgctcctaactttgtacacagccaagacggtagccaccttcgtaagactgtagtgtgggcacacgagaagtacggaatcgaatcttttgcactgattcacgactccttcggtaccattccggctgacgctgcgaacctgttcaaagcagtgcgcgaaactatggttgacacatatgagtcttgtgatgtactggctgatttctacgaccagttcgctgaccagttgcacgagtctcaattggacaaaatgccagcacttccggctaaaggtaacttgaacctccgtgacatcttagagtcggacttcgcgttcgcg

SEQ ID NO: 28 - protein, 890 aa, synthetic construct
  REGION 1..890: note = Variant of RNA polymerase
MHHHHHHMNTINIAKNDFSDIELAAIPFNTLADHYGERLAREQLALEHESYEMGEARFRKMFERQLKAGEVADNAAAKPLITTLLPKMIARINDWFEEVKAKRGKRPTAFQFLQEIKPEAVAYITIKTTLACLTSADNTTVQAVASAIGRAIEDEARFGRIRDLEAKHFKKNVEEQLNKRVGHVYKKAFMQVVEADMLSKGLLGGEAWSSWHKEDSIHVGVRCIEMLIESTGMVSLHRQNAGVVGQDSETIELAPEYAEAIATRAGALAGISPMFQPCVVPPKPWTGITGGGYWANGRRPLALVRTHSKKGLMRYEDVYMPEVYKAINIAQNTAWKINKKVLAVANVITKWKHCPVRDIPAIEREELPMKPEDIDMNPEALTAWKRAKAAVYRRDKARKSRRIYLEFMLEQANKFANHKAIWFPYNMDWRGRVYAVSMFKPQGNDMTKGLLTLAKGKPIGKEGYYWLKIHGANCAGVDKVPFPERIKFIEENHENIMACAKSPLENTWWAEQDLPFCFLAFCFEYAGVQHHGLSYNCSLPLAFDGSCSGIQHFSAMLRDEVGGRAVNLLPSETVQDIYGIVAKKVNEILQADAINGTDNEVVTVTDENTGEISEKVKLGTKALAGQWLAYGVTRSVTKRSVMTLAYGSKEFGFRQQVLEDTIQWAIDSGKGLMFTQPNQAAGYMAKLIWESVSVTVVAAVEAMNWLKSAAKLLAAEVKDKKTGEILRKRCAVHWVTPDGFPVWQEYKKPIQTRLNLMFLGQFRLQPTINTNKDSEIDAHKQESGIAPNFVHSQDGSHLRKTVVWAHEKYGIESFALIHDSFGTIPADAANLFKAVRETMVDTYESCDVLADFYDQFADQLHESQLDKMPALPAKGNLNLRDILESDFAFA

SEQ ID NO: 29 - DNA, 2670 bp, synthetic construct
  misc_feature 1..2670: note = Variant of RNA polymerase
  source 1..2670: mol_type = other DNA
atgcaccatcaccatcaccatatgaacacgattaacatcgctaagaacgacttctctgacatcgaactggctgctatcccgttcaacactctggctgaccattacggtgagcgtttagctcgcgaacagttggcccttgagcatgagtcttacgagatgggtgaagcacgcttccgcaagatgtttgagcgtcaacttaaagctggtgaggttgcggataacgctgccgccaagcctctcatcactaccctactccctaagatgattgcacgcatcaacgactggtttgaggaagtgaaagctaagcgcggcaagcgcccgacagccttccagttcctgcaagaaatcaagccggaagccgtagcgtacatcaccattaagaccactctggcttgcctaaccagtgcggaccgtacaaccgttcaggctgtagcaagcgcaatcggtcgggccattgaggacgaggctcgcttcggtcgtatccgtgaccttgaagctaagcacttcaagaaaaacgttgaggaacaactcaacaagcgcgtagggcacgtctacaagaaagcatttatgcaagttgtcgaggctgacatgctctctaagggtctactcggtggcgaggcgtggtcttcgtggcataaggaagactctattcatgtaggagtacgctgcatcgagatgctcattgagtcaaccggaatggttagcttacaccgccaaaatgctggcgtagtaggtcaagactctgagactatcgaactcgcacctgaatacgctgaggctatcgcaacccgtgcaggtgcgctggctggcatctctccgatgttccaaccttgcgtagttcctcctaagccgtggactggcattactggtggtggctattgggctaacggtcgtcgtcctctggcgctggtgcgtactcacagtaagaaagctctgatgcgctacgaagacgtttacatgcctgaggtgtacaaagcgattaacattgcgcaaaacaccgcatggaagatcaacaagtgggtcctggcggtcgccaacgtaatcaccaagtggaagcattgtccggtccgggacatccctgcgattgagcgtgaagaactcccgatgaaaccggaagacatcgacatgaatcctgaggctctcaccgcgtggaaacgtgctgcagctgctgtgtaccgcagagacaaggctcgcaagtctcgtcgtatcctgcttgagttcatgcttgagcaagccaataagtttgctaaccataaggccatctggttcccttacaacatggactggcgcggtcgtgtttacgctgtgtcaatgttcaacccgcaaggtaacgatatgaccaaaggactgcttacgctggcgaaaggtaaaccaatcggtaaggaaggttactactggctgaaaatccacggtgcaaactgtgcgggtgtcgataaggttccgttccctgagcgcatcaagttcattgaggaaaaccacgagaacatcatggcttgcgctaagtctccactggagaacacttggtgggctgagcaagatctcccgttctgcttccttgcgttctgctttgagtacgctggggtacagcaccacggcctgagctataactgctcccttccgctggcgtttgacgggtcttgctctggcatccagcacttctccgcgatgctccgagatgaggtaggtggtcgcgcggttaacttgcttcctagtgaaaccgttcaggacatctacgggattgttgctaagaaagtcaacgagattctacaagcagacgcaatcaatgggaccgataacgaagtagttaccgtgaccgatgagaacactggtgaaatctctgagaaagtcaagctgggcactaaggcactggctggtcaatggctggcttacggtgttactcgcagtgtgactaagcgttcagtcatgacgctggcttacgggtccaaagagttcggcttccgtcaacaagtgctggaagatactattcagtgggctattgattccggcaagggtctgatgttcactcagccgaatcaggctgctggatacatggctaagctgatttgggaatctgtgagcgtgacggtggtagctgcggttgaagcaatgaactggcttaagtctgctgctaagctgctggctgctgaggtcaaagataagaagactggagagattcttcgcaagcgttgcgctgtgcattgggtaactcctgatggtttccctgtgtggcaggaatacaagaagcctattcagacgcgcttgaacctgatgttcctcggtcagttccgcttacagcctaccattaacaccaacaaagatagcgagattgatgcacacaaacaggagtctggtatcgctcctaactttgtacacagccaagacggtagccaccttcgtaagactgtagtgtgggcacacgagaagtacggaatcgaatcttttgcactgattcacgactccttcggtaccattccggctgacgctgcgaacctgttcaaagcagtgcgcgaaactatggttgacacatatgagtcttgtgatgtactggctgatttctacgaccagttcgctgaccagttgcacgagtctcaattggacaaaatgccagcacttccggctaaaggtaacttgaacctccgtgacatcttagagtcggacttcgcgttcgcg

SEQ ID NO: 30 - protein, 890 aa, synthetic construct
  REGION 1..890: note = Variant of RNA polymerase
MHHHHHHMNTINIAKNDFSDIELAAIPFNTLADHYGERLAREQLALEHESYEMGEARFRKMFERQLKAGEVADNAAAKPLITTLLPKMIARINDWFEEVKAKRGKRPTAFQFLQEIKPEAVAYITIKTTLACLTSADRTTVQAVASAIGRAIEDEARFGRIRDLEAKHFKKNVEEQLNKRVGHVYKKAFMQVVEADMLSKGLLGGEAWSSWHKEDSIHVGVRCIEMLIESTGMVSLHRQNAGVVGQDSETIELAPEYAEAIATRAGALAGISPMFQPCVVPPKPWTGITGGGYWANGRRPLALVRTHSKKALMRYEDVYMPEVYKAINIAQNTAWKINKWVLAVANVITKWKHCPVRDIPAIEREELPMKPEDIDMNPEALTAWKRAAAAVYRRDKARKSRRILLEFMLEQANKFANHKAIWFPYNMDWRGRVYAVSMFNPQGNDMTKGLLTLAKGKPIGKEGYYWLKIHGANCAGVDKVPFPERIKFIEENHENIMACAKSPLENTWWAEQDLPFCFLAFCFEYAGVQHHGLSYNCSLPLAFDGSCSGIQHFSAMLRDEVGGRAVNLLPSETVQDIYGIVAKKVNEILQADAINGTDNEVVTVTDENTGEISEKVKLGTKALAGQWLAYGVTRSVTKRSVMTLAYGSKEFGFRQQVLEDTIQWAIDSGKGLMFTQPNQAAGYMAKLIWESVSVTVVAAVEAMNWLKSAAKLLAAEVKDKKTGEILRKRCAVHWVTPDGFPVWQEYKKPIQTRLNLMFLGQFRLQPTINTNKDSEIDAHKQESGIAPNFVHSQDGSHLRKTVVWAHEKYGIESFALIHDSFGTIPADAANLFKAVRETMVDTYESCDVLADFYDQFADQLHESQLDKMPALPAKGNLNLRDILESDFAFA

SEQ ID NO: 31 - DNA, 2670 bp, synthetic construct
  misc_feature 1..2670: note = Variant of RNA polymerase
  source 1..2670: mol_type = other DNA
atgcaccatcaccatcaccatatgaacacgattaacatcgctaagaacgacttctctgacatcgaactggctgctatcccgttcaacactctggctgaccattacggtgagcgtttagctcgcgaacagttggcccttgagcatgagtcttacgagatgggtgaagcacgcttccgcaagatgtttgagcgtcaacttaaagctggtgaggttgcggataacgctgccgccaagcctctcatcactaccctactccctaagatgattgcacgcatcaacgactggtttgaggaagtgaaagctaagcgcggcaagcgcccgacagccttccagttcctgcaagaaatcaagccggaagccgtagcgtacatcaccattaagaccactctggcttgcctaaccagtgcggaccgtacaaccgttcaggctgtagcaagcgcaatcggtcgggccattgaggacgaggctcgcttcggtcgtatccgtgaccttgaagctaagcacttcaagaaaaacgttgaggaacaactcaacaagcgcgtagggcacgtctacaagaaagcatttatgcaagttgtcgaggctgacatgctctctaagggtctactcggtggcgaggcgtggtcttcgtggcataaggaagactctattcatgtaggagtacgctgcatcgagatgctcattgagtcaaccggaatggttagcttacaccgccaaaatgctggcgtagtaggtcaagactctgagactatcgaactcgcacctgaatacgctgaggctatcgcaacccgtgcaggtgcgctggctggcatctctccgatgttccaaccttgcgtagttcctcctaagccgtggactggcattactggtggtggctattgggctaacggtcgtcgtcctctggcgctggtgcgtactcacagtaagaaaggtctgatgcgctacgaagacgtttacatgcctgaggtgtacaaagcgattaacattgcgcaaaacaccgcctggtcgatcaacaagtgggtcctggcggtcgccaacgtaatcaccaagtggaagcattgtccggtccgggacatccctgcgattgagcgtgaagaactcccgatgaaaccggaagacatcgacatgaatcctgaggctctcaccgcgtggaaacgtgctaaagctgctgtgtaccgcagagacaaggctcgcaagtctcgccgtatcttgcttgagttcatgcttgagcaagccaataagtttgctaaccataaggccatctggttcccttacaacatggactggcgcggtcgtgtttacgctgtgtcaatgttcaacccgcaaggtaacgatatgaccaaaggactgcttacgctggcgaaaggtaaaccaatcggtaaggaaggttactactggctgaaaatccacggtgcaaactgtgcgggtgtcgataaggttccgttccctgagcgcatcaagttcattgaggaaaaccacgagaacatcatggcttgcgctaagtctccactggagaacacttggtgggctgagcaagatctcccgttctgcttccttgcgttctgctttgagtacgctggggtacagcaccacggcctgagctataactgctcccttccgctggcgtttgacgggtcttgctctggcatccagcacttctccgcgatgctccgagatgaggtaggtggtcgcgcggttaacttgcttcctagtgaaaccgttcaggacatctacgggattgttgctaagaaagtcaacgagattctacaagcagacgcaatcaatgggaccgataacgaagtagttaccgtgaccgatgagaacactggtgaaatctctgagaaagtcaagctgggcactaaggcactggctggtcaatggctggcttacggtgttactcgcagtgtgactaagcgttcagtcatgacgctggcttacgggtccaaagagttcggcttccgtcaacaagtgctggaagatactattcagtgggctattgattccggcaagggtctgatgttcactcagccgaatcaggctgctggatacatggctaagctgatttgggaatctgtgagcgtgacggtggtagctgcggttgaagcaatgaactggcttaagtctgctgctaagctgctggctgctgaggtcaaagataagaagactggagagattcttcgcaagcgttgcgctgtgcattgggtaactcctgatggtttccctgtgtggcaggaatacaagaagcctattcagacgcgcttgaacctgatgttcctcggtcagttccgcttacagcctaccattaacaccaacaaagatagcgagattgatgcacacaaacaggagtctggtatcgctcctaactttgtacacagccaagacggtagccaccttcgtaagactgtagtgtgggcacacgagaagtacggaatcgaatcttttgcactgattcacgactccttcggtaccattccggctgacgctgcgaacctgttcaaagcagtgcgcgaaactatggttgacacatatgagtcttgtgatgtactggctgatttctacgaccagttcgctgaccagttgcacgagtctcaattggacaaaatgccagcacttccggctaaaggtaacttgaacctccgtgacatcttagagtcggacttcgcgttcgcg

SEQ ID NO: 32 - protein, 890 aa, synthetic construct
  REGION 1..890: note = Variant of RNA polymerase
MHHHHHHMNTINIAKNDFSDIELAAIPFNTLADHYGERLAREQLALEHESYEMGEARFRKMFERQLKAGEVADNAAAKPLITTLLPKMIARINDWFEEVKAKRGKRPTAFQFLQEIKPEAVAYITIKTTLACLTSADRTTVQAVASAIGRAIEDEARFGRIRDLEAKHFKKNVEEQLNKRVGHVYKKAFMQVVEADMLSKGLLGGEAWSSWHKEDSIHVGVRCIEMLIESTGMVSLHRQNAGVVGQDSETIELAPEYAEAIATRAGALAGISPMFQPCVVPPKPWTGITGGGYWANGRRPLALVRTHSKKGLMRYEDVYMPEVYKAINIAQNTAWSINKWVLAVANVITKWKHCPVRDIPAIEREELPMKPEDIDMNPEALTAWKRAKAAVYRRDKARKSRRILLEFMLEQANKFANHKAIWFPYNMDWRGRVYAVSMFNPQGNDMTKGLLTLAKGKPIGKEGYYWLKIHGANCAGVDKVPFPERIKFIEENHENIMACAKSPLENTWWAEQDLPFCFLAFCFEYAGVQHHGLSYNCSLPLAFDGSCSGIQHFSAMLRDEVGGRAVNLLPSETVQDIYGIVAKKVNEILQADAINGTDNEVVTVTDENTGEISEKVKLGTKALAGQWLAYGVTRSVTKRSVMTLAYGSKEFGFRQQVLEDTIQWAIDSGKGLMFTQPNQAAGYMAKLIWESVSVTVVAAVEAMNWLKSAAKLLAAEVKDKKTGEILRKRCAVHWVTPDGFPVWQEYKKPIQTRLNLMFLGQFRLQPTINTNKDSEIDAHKQESGIAPNFVHSQDGSHLRKTVVWAHEKYGIESFALIHDSFGTIPADAANLFKAVRETMVDTYESCDVLADFYDQFADQLHESQLDKMPALPAKGNLNLRDILESDFAFA

SEQ ID NO: 33 - DNA, 2670 bp, synthetic construct
  misc_feature 1..2670: note = Variant of RNA polymerase
  source 1..2670: mol_type = other DNA
atgcaccatcaccatcaccatatgaacacgattaacatcgctaagaacgacttctctgacatcgaactggctgctatcccgttcaacactctggctgaccattacggtgagcgtttagctcgcgaacagttggcccttgagcatgagtcttacgagatgggtgaagcacgcttccgcaagatgtttgagcgtcaacttaaagctggtgaggttgcggataacgctgccgccaagcctctcatcactaccctactccctaagatgattgcacgcatcaacgactggtttgaggaagtgaaagctaagcgcggcaagcgcccgacagccttccagttcctgcaagaaatcaagccggaagccgtagcgtacatcaccattaagaccactctggcttgcctaaccagtgcggacaacacaaccgttcaggctgtagcaagcgcaatcggtcgggccattgaggacgaggctcgcttcggtcgtatccgtgaccttgaagctaagcacttcaagaaaaacgttgaggaacaactcaacaagcgcgtagggcacgtctacaagaaagcatttatgcaagttgtcgaggctgacatgctctctaagggtctactcggtggcgaggcgtggtcttcgtggcataaggaagactctattcatgtaggagtacgctgcatcgagatgctcattgagtcaaccggaatggttagcttacaccgccaaaatgctggcgtagtaggtcaagactctgagactatcgaactcgcacctgaatacgctgaggctatcgcaacccgtgcaggtgcgctggctggcatctctccgatgttccaaccttgcgtagttcctcctaagccgtggactggcattactggtggtggctattgggctaacggtcgtcgtcctctggcgctggtgcgtactcacagtaagaaaggtctgatgcgctacgaagacgtttacatgcctgaggtgtacaaagcgattaacattgcgcaaaacaccgcctggaagatcaacaagaaggtcctggcggtcgccaacgtaatcaccaagtggaagcattgtccggtccgggacatccctgcgattgagcgtgaagaactcccgatgaaaccggaagacatcgacatgaatcctgaggctctcaccgcgtggaaacgtgctaaagctgctgtgtaccgcagagacaaggctcgcaagtctcgtcgtatcctgcttgagttcatgcttgagcaagccaataagtttgctaaccataaggccatctggttcccttacaacatggactggcgcggtcgtgtttacgctgtgtcaatgttcaagccgcaaggtaacgatatgaccaaaggactgcttacgctggcgaaaggtaaaccaatcggtaaggaaggttactactggctgaaaatccacggtgcaaactgtgcgggtgtcgataaggttccgttccctgagcgcatcaagttcattgaggaaaaccacgagaacatcatggcttgcgctaagtctccactggagaacacttggtgggctgagcaagatctcccgttctgcttccttgcgttctgctttgagtacgctggggtacagcaccacggcctgagctataactgctcccttccgctggcgtttgacgggtcttgctctggcatccagcacttctccgcgatgctccgagatgaggtaggtggtcgcgcggttaacttgcttcctagtgaaaccgttcaggacatctacgggattgttgctaagaaagtcaacgagattctacaagcagacgcaatcaatgggaccgataacgaagtagttaccgtgaccgatgagaacactggtgaaatctctgagaaagtcaagctgggcactaaggcactggctggtcaatggctggcttacggtgttactcgcagtgtgactaagcgttcagtcatgacgctggcttacgggtccaaagagttcggcttccgtcaacaagtgctggaagatactattcagtgggctattgattccggcaagggtctgatgttcactcagccgaatcaggctgctggatacatggctaagctgatttgggaatctgtgagcgtgacggtggtagctgcggttgaagcaatgaactggcttaagtctgctgctaagctgctggctgctgaggtcaaagataagaagactggagagattcttcgcaagcgttgcgctgtgcattgggtaactcctgatggtttccctgtgtggcaggaatacaagaagcctattcagacgcgcttgaacctgatgttcctcggtcagttccgcttacagcctaccattaacaccaacaaagatagcgagattgatgcacacaaacaggagtctggtatcgctcctaactttgtacacagccaagacggtagccaccttcgtaagactgtagtgtgggcacacgagaagtacggaatcgaatcttttgcactgattcacgactccttcggtaccattccggctgacgctgcgaacctgttcaaagcagtgcgcgaaactatggttgacacatatgagtcttgtgatgtactggctgatttctacgaccagttcgctgaccagttgcacgagtctcaattggacaaaatgccagcacttccggctaaaggtaacttgaacctccgtgacatcttagagtcggacttcgcgttcgcg

SEQ ID NO: 34 - protein, 890 aa, synthetic construct
  REGION 1..890: note = Variant of RNA polymerase
MHHHHHHMNTINIAKNDFSDIELAAIPFNTLADHYGERLAREQLALEHESYEMGEARFRKMFERQLKAGEVADNAAAKPLITTLLPKMIARINDWFEEVKAKRGKRPTAFQFLQEIKPEAVAYITIKTTLACLTSADNTTVQAVASAIGRAIEDEARFGRIRDLEAKHFKKNVEEQLNKRVGHVYKKAFMQVVEADMLSKGLLGGEAWSSWHKEDSIHVGVRCIEMLIESTGMVSLHRQNAGVVGQDSETIELAPEYAEAIATRAGALAGISPMFQPCVVPPKPWTGITGGGYWANGRRPLALVRTHSKKGLMRYEDVYMPEVYKAINIAQNTAWKINKKVLAVANVITKWKHCPVRDIPAIEREELPMKPEDIDMNPEALTAWKRAKAAVYRRDKARKSRRILLEFMLEQANKFANHKAIWFPYNMDWRGRVYAVSMFKPQGNDMTKGLLTLAKGKPIGKEGYYWLKIHGANCAGVDKVPFPERIKFIEENHENIMACAKSPLENTWWAEQDLPFCFLAFCFEYAGVQHHGLSYNCSLPLAFDGSCSGIQHFSAMLRDEVGGRAVNLLPSETVQDIYGIVAKKVNEILQADAINGTDNEVVTVTDENTGEISEKVKLGTKALAGQWLAYGVTRSVTKRSVMTLAYGSKEFGFRQQVLEDTIQWAIDSGKGLMFTQPNQAAGYMAKLIWESVSVTVVAAVEAMNWLKSAAKLLAAEVKDKKTGEILRKRCAVHWVTPDGFPVWQEYKKPIQTRLNLMFLGQFRLQPTINTNKDSEIDAHKQESGIAPNFVHSQDGSHLRKTVVWAHEKYGIESFALIHDSFGTIPADAANLFKAVRETMVDTYESCDVLADFYDQFADQLHESQLDKMPALPAKGNLNLRDILESDFAFA

SEQ ID NO: 35 - DNA, 2670 bp, synthetic construct
  misc_feature 1..2670: note = Variant of RNA polymerase
  source 1..2670: mol_type = other DNA
atgcaccatcaccatcaccatatgaacacgattaacatcgctaagaacgacttctctgacatcgaactggctgctatcccgttcaacactctggctgaccattacggtgagcgtttagctcgcgaacagttggcccttgagcatgagtcttacgagatgggtgaagcacgcttccgcaagatgtttgagcgtcaacttaaagctggtgaggttgcggataacgctgccgccaagcctctcatcactaccctactccctaagatgattgcacgcatcaacgactggtttgaggaagtgaaagctaagcgcggcaagcgcccgacagccttccagttcctgcaagaaatcaagccggaagccgtagcgtacatcaccattaagaccactctggcttgcctaaccagtgcggaccgtacaaccgttcaggctgtagcaagcgcaatcggtcgggccattgaggacgaggctcgcttcggtcgtatccgtgaccttgaagctaagcacttcaagaaaaacgttgaggaacaactcaacaagcgcgtagggcacgtctacaagaaagcatttatgcaagttgtcgaggctgacatgctctctaagggtctactcggtggcgaggcgtggtcttcgtggcataaggaagactctattcatgtaggagtacgctgcatcgagatgctcattgagtcaaccggaatggttagcttacaccgccaaaatgctggcgtagtaggtcaagactctgagactatcgaactcgcacctgaatacgctgaggctatcgcaacccgtgcaggtgcgctggctggcatctctccgatgttccaaccttgcgtagttcctcctaagccgtggactggcattactggtggtggctattgggctaacggtcgtcgtcctctggcgctggtgcgtactcacagtaagaaaggtctgatgcgctacgaagacgtttacatgcctgaggtgtacaaagcgattaacattgcgcaaaacaccgcctggaagatcaacaaggaggtcctggcggtcgccaacgtaatcaccaagtggaagcattgtccggtccgtgacatccctgcgattgagcgtgaagaactcccgatgaaaccggaagacatcgacatgaatcctgaggctctcaccgcgtggaaacgtgctaaagctgctgtgtaccgcagagacaaggctcgcaagtctcgtcgtatctatcttgagttcatgcttgagcaagccaataagtttgctaaccataaggccatctggttcccttacaacatggactggcgcggtcgtgtttacgctgtgtcaatgttcaagccgcaaggtaacgatatgaccaaaggactgcttacgctggcgaaaggtaaaccaatcggtaaggaaggttactactggctgaaaatccacggtgcaaactgtgcgggtgtcgataaggttccgttccctgagcgcatcaagttcattgaggaaaaccacgagaacatcatggcttgcgctaagtctccactggagaacacttggtgggctgagcaagatctcccgttctgcttccttgcgttctgctttgagtacgctggggtacagcaccacggcctgagctataactgctcccttccgctggcgtttgacgggtcttgctctggcatccagcacttctccgcgatgctccgagatgaggtaggtggtcgcgcggttaacttgcttcctagtgaaaccgttcaggacatctacgggattgttgctaagaaagtcaacgagattctacaagcagacgcaatcaatgggaccgataacgaagtagttaccgtgaccgatgagaacactggtgaaatctctgagaaagtcaagctgggcactaaggcactggctggtcaatggctggcttacggtgttactcgcagtgtgactaagcgttcagtcatgacgctggcttacgggtccaaagagttcggcttccgtcaacaagtgctggaagatactattcagtgggctattgattccggcaagggtctgatgttcactcagccgaatcaggctgctggatacatggctaagctgatttgggaatctgtgagcgtgacggtggtagctgcggttgaagcaatgaactggcttaagtctgctgctaagctgctggctgctgaggtcaaagataagaagactggagagattcttcgcaagcgttgcgctgtgcattgggtaactcctgatggtttccctgtgtggcaggaatacaagaagcctattcagacgcgcttgaacctgatgttcctcggtcagttccgcttacagcctaccattaacaccaacaaagatagcgagattgatgcacacaaacaggagtctggtatcgctcctaactttgtacacagccaagacggtagccaccttcgtaagactgtagtgtgggcacacgagaagtacggaatcgaatcttttgcactgattcacgactccttcggtaccattccggctgacgctgcgaacctgttcaaagcagtgcgcgaaactatggttgacacatatgagtcttgtgatgtactggctgatttctacgaccagttcgctgaccagttgcacgagtctcaattggacaaaatgccagcacttccggctaaaggtaacttgaacctccgtgacatcttagagtcggacttcgcgttcgcg

SEQ ID NO: 36 - protein, 890 aa, synthetic construct
  REGION 1..890: note = Variant of RNA polymerase
MHHHHHHMNTINIAKNDFSDIELAAIPFNTLADHYGERLAREQLALEHESYEMGEARFRKMFERQLKAGEVADNAAAKPLITTLLPKMIARINDWFEEVKAKRGKRPTAFQFLQEIKPEAVAYITIKTTLACLTSADRTTVQAVASAIGRAIEDEARFGRIRDLEAKHFKKNVEEQLNKRVGHVYKKAFMQVVEADMLSKGLLGGEAWSSWHKEDSIHVGVRCIEMLIESTGMVSLHRQNAGVVGQDSETIELAPEYAEAIATRAGALAGISPMFQPCVVPPKPWTGITGGGYWANGRRPLALVRTHSKKGLMRYEDVYMPEVYKAINIAQNTAWKINKEVLAVANVITKWKHCPVRDIPAIEREELPMKPEDIDMNPEALTAWKRAKAAVYRRDKARKSRRIYLEFMLEQANKFANHKAIWFPYNMDWRGRVYAVSMFKPQGNDMTKGLLTLAKGKPIGKEGYYWLKIHGANCAGVDKVPFPERIKFIEENHENIMACAKSPLENTWWAEQDLPFCFLAFCFEYAGVQHHGLSYNCSLPLAFDGSCSGIQHFSAMLRDEVGGRAVNLLPSETVQDIYGIVAKKVNEILQADAINGTDNEVVTVTDENTGEISEKVKLGTKALAGQWLAYGVTRSVTKRSVMTLAYGSKEFGFRQQVLEDTIQWAIDSGKGLMFTQPNQAAGYMAKLIWESVSVTVVAAVEAMNWLKSAAKLLAAEVKDKKTGEILRKRCAVHWVTPDGFPVWQEYKKPIQTRLNLMFLGQFRLQPTINTNKDSEIDAHKQESGIAPNFVHSQDGSHLRKTVVWAHEKYGIESFALIHDSFGTIPADAANLFKAVRETMVDTYESCDVLADFYDQFADQLHESQLDKMPALPAKGNLNLRDILESDFAFA

SEQ ID NO: 37 - DNA, 2670 bp, synthetic construct
  misc_feature 1..2670: note = Variant of RNA polymerase
  source 1..2670: mol_type = other DNA
atgcaccatcaccatcaccatatgaacacgattaacatcgctaagaacgacttctctgacatcgaactggctgctatcccgttcaacactctggctgaccattacggtgagcgtttagctcgcgaacagttggcccttgagcatgagtcttacgagatgggtgaagcacgcttccgcaagatgtttgagcgtcaacttaaagctggtgaggttgcggataacgctgccgccaagcctctcatcactaccctactccctaagatgattgcacgcatcaacgactggtttgaggaagtgaaagctaagcgcggcaagcgcccgacagccttccagttcctgcaagaaatcaagccggaagccgtagcgtacatcaccattaagaccactctggcttgcctaaccagtgcggaccgtacaaccgttcaggctgtagcaagcgcaatcggtcgggccattgaggacgaggctcgcttcggtcgtatccgtgaccttgaagctaagcacttcaagaaaaacgttgaggaacaactcaacaagcgcgtagggcacgtctacaagaaagcatttatgcaagttgtcgaggctgacatgctctctaagggtctactcggtggcgaggcgtggtcttcgtggcataaggaagactctattcatgtaggagtacgctgcatcgagatgctcattgagtcaaccggaatggttagcttacaccgccaaaatgctggcgtagtaggtcaagactctgagactatcgaactcgcacctgaatacgctgaggctatcgcaacccgtgcaggtgcgctggctggcatctctccgatgttccaaccttgcgtagttcctcctaagccgtggactggcattactggtggtggctattgggctaacggtcgtcgtcctctggcgctggtgcgtactcacagtaagaaagctctgatgcgctacgaagacgtttacatgcctgaggtgtacaaagcgattaacattgcgcaaaacaccgcctggatgatcaacaagaaggtccaggcggtcgccaacgtaatcaccaagtggaagcattgtccggtccgggacatccctgcgattgagcgtgaagaactcccgatgaaaccggaagacatcgacatgaatcctgaggctctcaccgcgtggaaacgtgctgcagctgctgtgtaccgcagagacaaggctcgcaagtctcgccgtatcttgcttgagttcatgcttgagcaagccaataagtttgctaaccataaggccatctggttcccttacaacatggactggcgcggtcgtgtttacgctgtgtcaatgttcaacccgcaaggtaacgatatgaccaaaggactgcttacgctggcgaaaggtaaaccaatcggtaaggaaggttactactggctgaaaatccacggtgcaaactgtgcgggtgtcgataaggttccgttccctgagcgcatcaagttcattgaggaaaaccacgagaacatcatggcttgcgctaagtctccactggagaacacttggtgggctgagcaagatctcccgttctgcttccttgcgttctgctttgagtacgctggggtacagcaccacggcctgagctataactgctcccttccgctggcgtttgacgggtcttgctctggcatccagcacttctccgcgatgctccgagatgaggtaggtggtcgcgcggttaacttgcttcctagtgaaaccgttcaggacatctacgggattgttgctaagaaagtcaacgagattctacaagcagacgcaatcaatgggaccgataacgaagtagttaccgtgaccgatgagaacactggtgaaatctctgagaaagtcaagctgggcactaaggcactggctggtcaatggctggcttacggtgttactcgcagtgtgactaagcgttcagtcatgacgctggcttacgggtccaaagagttcggcttccgtcaacaagtgctggaagatactattcagtgggctattgattccggcaagggtctgatgttcactcagccgaatcaggctgctggatacatggctaagctgatttgggaatctgtgagcgtgacggtggtagctgcggttgaagcaatgaactggcttaagtctgctgctaagctgctggctgctgaggtcaaagataagaagactggagagattcttcgcaagcgttgcgctgtgcattgggtaactcctgatggtttccctgtgtggcaggaatacaagaagcctattcagacgcgcttgaacctgatgttcctcggtcagttccgcttacagcctaccattaacaccaacaaagatagcgagattgatgcacacaaacaggagtctggtatcgctcctaactttgtacacagccaagacggtagccaccttcgtaagactgtagtgtgggcacacgagaagtacggaatcgaatcttttgcactgattcacgactccttcggtaccattccggctgacgctgcgaacctgttcaaagcagtgcgcgaaactatggttgacacatatgagtcttgtgatgtactggctgatttctacgaccagttcgctgaccagttgcacgagtctcaattggacaaaatgccagcacttccggctaaaggtaacttgaacctccgtgacatcttagagtcggacttcgcgttcgcg

SEQ ID NO: 38 - protein, 890 aa, synthetic construct
  REGION 1..890: note = Variant of RNA polymerase
MHHHHHHMNTINIAKNDFSDIELAAIPFNTLADHYGERLAREQLALEHESYEMGEARFRKMFERQLKAGEVADNAAAKPLITTLLPKMIARINDWFEEVKAKRGKRPTAFQFLQEIKPEAVAYITIKTTLACLTSADRTTVQAVASAIGRAIEDEARFGRIRDLEAKHFKKNVEEQLNKRVGHVYKKAFMQVVEADMLSKGLLGGEAWSSWHKEDSIHVGVRCIEMLIESTGMVSLHRQNAGVVGQDSETIELAPEYAEAIATRAGALAGISPMFQPCVVPPKPWTGITGGGYWANGRRPLALVRTHSKKALMRYEDVYMPEVYKAINIAQNTAWMINKKVQAVANVITKWKHCPVRDIPAIEREELPMKPEDIDMNPEALTAWKRAAAAVYRRDKARKSRRILLEFMLEQANKFANHKAIWFPYNMDWRGRVYAVSMFNPQGNDMTKGLLTLAKGKPIGKEGYYWLKIHGANCAGVDKVPFPERIKFIEENHENIMACAKSPLENTWWAEQDLPFCFLAFCFEYAGVQHHGLSYNCSLPLAFDGSCSGIQHFSAMLRDEVGGRAVNLLPSETVQDIYGIVAKKVNEILQADAINGTDNEVVTVTDENTGEISEKVKLGTKALAGQWLAYGVTRSVTKRSVMTLAYGSKEFGFRQQVLEDTIQWAIDSGKGLMFTQPNQAAGYMAKLIWESVSVTVVAAVEAMNWLKSAAKLLAAEVKDKKTGEILRKRCAVHWVTPDGFPVWQEYKKPIQTRLNLMFLGQFRLQPTINTNKDSEIDAHKQESGIAPNFVHSQDGSHLRKTVVWAHEKYGIESFALIHDSFGTIPADAANLFKAVRETMVDTYESCDVLADFYDQFADQLHESQLDKMPALPAKGNLNLRDILESDFAFA

SEQ ID NO: 39 - DNA, 2670 bp, synthetic construct
  misc_feature 1..2670: note = Variant of RNA polymerase
  source 1..2670: mol_type = other DNA
atgcaccatcaccatcaccatatgaacacgattaacatcgctaagaacgacttctctgacatcgaactggctgctatcccgttcaacactctggctgaccattacggtgagcgtttagctcgcgaacagttggcccttgagcatgagtcttacgagatgggtgaagcacgcttccgcaagatgtttgagcgtcaacttaaagctggtgaggttgcggataacgctgccgccaagcctctcatcactaccctactccctaagatgattgcacgcatcaacgactggtttgaggaagtgaaagctaagcgcggcaagcgcccgacagccttccagttcctgcaagaaatcaagccggaagccgtagcgtacatcaccattaagaccactctggcttgcctaaccagtgcggacaacacaaccgttcaggctgtagcaagcgcaatcggtcgggccattgaggacgaggctcgcttcggtcgtatccgtgaccttgaagctaagcacttcaagaaaaacgttgaggaacaactcaacaagcgcgtagggcacgtctacaagaaagcatttatgcaagttgtcgaggctgacatgctctctaagggtctactcggtggcgaggcgtggtcttcgtggcataaggaagactctattcatgtaggagtacgctgcatcgagatgctcattgagtcaaccggaatggttagcttacaccgccaaaatgctggcgtagtaggtcaagactctgagactatcgaactcgcacctgaatacgctgaggctatcgcaacccgtgcaggtgcgctggctggcatctctccgatgttccaaccttgcgtagttcctcctaagccgtggactggcattactggtggtggctattgggctaacggtcgtcgtcctctggcgctggtgcgtactcacagtaagaaagctctgatgcgctacgaagacgtttacatgcctgaggtgtacaaagcgattaacattgcgcaaaacaccgcatggaaaatcaacaagaaagtcctagcggtcgccaacgtaatcaccaagctgaagcattgtccggtccgggacatccctgcgattgagcgtgaagaactcccgatgaaaccggaagacatcgacatgaatcctgaggctctcaccgcgtggaaacgtgctaaagctgctgtgtaccgcagagacaaggctcgcaagtctcgtcgtatcctgcttgagttcatgcttgagcaagccaataagtttgctaaccataaggccatctggttcccttacaacatggactggcgcggtcgtgtttacgctgtgtcaatgttcaacccgcaaggtaacgatatgaccaaaggactgcttacgctggcgaaaggtaaaccaatcggtaaggaaggttactactggctgaaaatccacggtgcaaactgtgcgggtgtcgataaggttccgttccctgagcgcatcaagttcattgaggaaaaccacgagaacatcatggcttgcgctaagtctccactggagaacacttggtgggctgagcaagatctcccgttctgcttccttgcgttctgctttgagtacgctggggtacagcaccacggcctgagctataactgctcccttccgctggcgtttgacgggtcttgctctggcatccagcacttctccgcgatgctccgagatgaggtaggtggtcgcgcggttaacttgcttcctagtgaaaccgttcaggacatctacgggattgttgctaagaaagtcaacgagattctacaagcagacgcaatcaatgggaccgataacgaagtagttaccgtgaccgatgagaacactggtgaaatctctgagaaagtcaagctgggcactaaggcactggctggtcaatggctggcttacggtgttactcgcagtgtgactaagcgttcagtcatgacgctggcttacgggtccaaagagttcggcttccgtcaacaagtgctggaagatactattcagtgggctattgattccggcaagggtctgatgttcactcagccgaatcaggctgctggatacatggctaagctgatttgggaatctgtgagcgtgacggtggtagctgcggttgaagcaatgaactggcttaagtctgctgctaagctgctggctgctgaggtcaaagataagaagactggagagattcttcgcaagcgttgcgctgtgcattgggtaactcctgatggtttccctgtgtggcaggaatacaagaagcctattcagacgcgcttgaacctgatgttcctcggtcagttccgcttacagcctaccattaacaccaacaaagatagcgagattgatgcacacaaacaggagtctggtatcgctcctaactttgtacacagccaagacggtagccaccttcgtaagactgtagtgtgggcacacgagaagtacggaatcgaatcttttgcactgattcacgactccttcggtaccattccggctgacgctgcgaacctgttcaaagcagtgcgcgaaactatggttgacacatatgagtcttgtgatgtactggctgatttctacgaccagttcgctgaccagttgcacgagtctcaattggacaaaatgccagcacttccggctaaaggtaacttgaacctccgtgacatcttagagtcggacttcgcgttcgcg

SEQ ID NO: 40 - protein, 890 aa, synthetic construct
  REGION 1..890: note = Variant of RNA polymerase
MHHHHHHMNTINIAKNDFSDIELAAIPFNTLADHYGERLAREQLALEHESYEMGEARFRKMFERQLKAGEVADNAAAKPLITTLLPKMIARINDWFEEVKAKRGKRPTAFQFLQEIKPEAVAYITIKTTLACLTSADNTTVQAVASAIGRAIEDEARFGRIRDLEAKHFKKNVEEQLNKRVGHVYKKAFMQVVEADMLSKGLLGGEAWSSWHKEDSIHVGVRCIEMLIESTGMVSLHRQNAGVVGQDSETIELAPEYAEAIATRAGALAGISPMFQPCVVPPKPWTGITGGGYWANGRRPLALVRTHSKKALMRYEDVYMPEVYKAINIAQNTAWKINKKVLAVANVITKLKHCPVRDIPAIEREELPMKPEDIDMNPEALTAWKRAKAAVYRRDKARKSRRILLEFMLEQANKFANHKAIWFPYNMDWRGRVYAVSMFNPQGNDMTKGLLTLAKGKPIGKEGYYWLKIHGANCAGVDKVPFPERIKFIEENHENIMACAKSPLENTWWAEQDLPFCFLAFCFEYAGVQHHGLSYNCSLPLAFDGSCSGIQHFSAMLRDEVGGRAVNLLPSETVQDIYGIVAKKVNEILQADAINGTDNEVVTVTDENTGEISEKVKLGTKALAGQWLAYGVTRSVTKRSVMTLAYGSKEFGFRQQVLEDTIQWAIDSGKGLMFTQPNQAAGYMAKLIWESVSVTVVAAVEAMNWLKSAAKLLAAEVKDKKTGEILRKRCAVHWVTPDGFPVWQEYKKPIQTRLNLMFLGQFRLQPTINTNKDSEIDAHKQESGIAPNFVHSQDGSHLRKTVVWAHEKYGIESFALIHDSFGTIPADAANLFKAVRETMVDTYESCDVLADFYDQFADQLHESQLDKMPALPAKGNLNLRDILESDFAFA

SEQ ID NO: 41 - DNA, 2670 bp, synthetic construct
  misc_feature 1..2670: note = Variant of RNA polymerase
  source 1..2670: mol_type = other DNA
atgcaccatcaccatcaccatatgaacacgattaacatcgctaagaacgacttctctgacatcgaactggctgctatcccgttcaacactctggctgaccattacggtgagcgtttagctcgcgaacagttggcccttgagcatgagtcttacgagatgggtgaagcacgcttccgcaagatgtttgagcgtcaacttaaagctggtgaggttgcggataacgctgccgccaagcctctcatcactaccctactccctaagatgattgcacgcatcaacgactggtttgaggaagtgaaagctaagcgcggcaagcgcccgacagccttccagttcctgcaagaaatcaagccggaagccgtagcgtacatcaccattaagaccactctggcttgcctaaccagtgcggaccgtacaaccgttcaggctgtagcaagcgcaatcggtcgggccattgaggacgaggctcgcttcggtcgtatccgtgaccttgaagctaagcacttcaagaaaaacgttgaggaacaactcaacaagcgcgtagggcacgtctacaagaaagcatttatgcaagttgtcgaggctgacatgctctctaagggtctactcggtggcgaggcgtggtcttcgtggcataaggaagactctattcatgtaggagtacgctgcatcgagatgctcattgagtcaaccggaatggttagcttacaccgccaaaatgctggcgtagtaggtcaagactctgagactatcgaactcgcacctgaatacgctgaggctatcgcaacccgtgcaggtgcgctggctggcatctctccgatgttccaaccttgcgtagttcctcctaagccgtggactggcattactggtggtggctattgggctaacggtcgtcgtcctctggcgctggtgcgtactcacagtaagaaaggtctgatgcgctacgaagacgtttacatgcctgaggtgtacaaagcgattaacattgcgcaaaacaccgcctggtcgatcaacaagtgggtcctggcggtcgccaacgtaatcaccaagtggaagcattgtccggtccgggacatccctgcgattgagcgtgaagaactcccgatgaaaccggaagacatcgacatgaatcctgaggctctcaccgcgtggaaacgtgctaaagctgctgtgtaccgcagagacaaggctcgcaagtctcgccgtatcttgcttgagttcatgcttgagcaagccaataagtttgctaaccataaggccatctggttcccttacaacatggactggcgcggtcgtgtttacgctgtgtcaatgttcaacccgcaaggtaacgatatgaccaaaggactgcttacgctggcgaaaggtaaaccaatcggtaaggaaggttactactggctgaaaatccacggtgcaaactgtgcgggtgtcgataaggttccgttccctgagcgcatcaagttcattgaggaaaaccacgagaacatcatggcttgcgctaagtctccactggagaacacttggtgggctgagcaagatagtccgttctgcttccttgcgttctgctttgagtacgctggggtacagcaccacggcctgagctataactgctcccttccgctggcgtttgacgggtcttgctctggcatccagcacttctccgcgatgctccgagatgaggtaggtggtcgcgcggttaacttgcttcctagtgaaaccgttcaggacatctacgggattgttgctaagaaagtcaacgagattctacaagcagacgcaatcaatgggaccgataacgaagtagttaccgtgaccgatgagaacactggtgaaatctctgagaaagtcaagctgggcactaaggcactggctggtcaatggctggcttacggtgttactcgcagtgtgactaagcgttcagtcatgacgctggcttacgggtccaaagagttcggcttccgtcaacaagtgctggaagatactattcagtgggctattgattccggcaagggtctgatgttcactcagccgaatcaggctgctggatacatggctaagctgatttgggaatctgtgagcgtgacggtggtagctgcggttgaagcaatgaactggcttaagtctgctgctaagctgctggctgctgaggtcaaagataagaagactggagagattcttcgcaagcgttgcgctgtgcattgggtaactcctgatggtttccctgtgtggcaggaatacaagaagcctattcagacgcgcttgaacctgatgttcctcggtcagttccgcttacagcctaccattaacaccaacaaagatagcgagattgatgcacacaaacaggagtctggtatcgctcctaactttgtacacagccaagacggtagccaccttcgtaagactgtagtgtgggcacacgagaagtacggaatcgaatcttttgcactgattcacgactccttcggtaccattccggctgacgctgcgaacctgttcaaagcagtgcgcgaaactatggttgacacatatgagtcttgtgatgtactggctgatttctacgaccagttcgctgaccagttgcacgagtctcaattggacaaaatgccagcacttccggctaaaggtaacttgaacctccgtgacatcttagagtcggacttcgcgttcgcg

SEQ ID NO: 42 - protein, 890 aa, synthetic construct
  REGION 1..890: note = Variant of RNA polymerase
MHHHHHHMNTINIAKNDFSDIELAAIPFNTLADHYGERLAREQLALEHESYEMGEARFRKMFERQLKAGEVADNAAAKPLITTLLPKMIARINDWFEEVKAKRGKRPTAFQFLQEIKPEAVAYITIKTTLACLTSADRTTVQAVASAIGRAIEDEARFGRIRDLEAKHFKKNVEEQLNKRVGHVYKKAFMQVVEADMLSKGLLGGEAWSSWHKEDSIHVGVRCIEMLIESTGMVSLHRQNAGVVGQDSETIELAPEYAEAIATRAGALAGISPMFQPCVVPPKPWTGITGGGYWANGRRPLALVRTHSKKGLMRYEDVYMPEVYKAINIAQNTAWSINKWVLAVANVITKWKHCPVRDIPAIEREELPMKPEDIDMNPEALTAWKRAKAAVYRRDKARKSRRILLEFMLEQANKFANHKAIWFPYNMDWRGRVYAVSMFNPQGNDMTKGLLTLAKGKPIGKEGYYWLKIHGANCAGVDKVPFPERIKFIEENHENIMACAKSPLENTWWAEQDSPFCFLAFCFEYAGVQHHGLSYNCSLPLAFDGSCSGIQHFSAMLRDEVGGRAVNLLPSETVQDIYGIVAKKVNEILQADAINGTDNEVVTVTDENTGEISEKVKLGTKALAGQWLAYGVTRSVTKRSVMTLAYGSKEFGFRQQVLEDTIQWAIDSGKGLMFTQPNQAAGYMAKLIWESVSVTVVAAVEAMNWLKSAAKLLAAEVKDKKTGEILRKRCAVHWVTPDGFPVWQEYKKPIQTRLNLMFLGQFRLQPTINTNKDSEIDAHKQESGIAPNFVHSQDGSHLRKTVVWAHEKYGIESFALIHDSFGTIPADAANLFKAVRETMVDTYESCDVLADFYDQFADQLHESQLDKMPALPAKGNLNLRDILESDFAFA

SEQ ID NO: 43 - DNA, 2670 bp, synthetic construct
  misc_feature 1..2670: note = Variant of RNA polymerase
  source 1..2670: mol_type = other DNA
atgcaccatcaccatcaccatatgaacacgattaacatcgctaagaacgacttctctgacatcgaactggctgctatcccgttcaacactctggctgaccattacggtgagggcttagctcgcgaacagttggcccttgagcatgagtcttacgagatgggtgaagcacgcttccgcaagatgtttgagcgtcaacttaaagctggtgaggttgcggataacgctgccgccaagcctctcatcactaccctactccctaagatgattgcacgcatcaacgactggtttgaggaagtgaaagctaagcgcggcaagcgcccgacagccttccagttcctgcaagaaatcaagccggaagccgtagcgtacatcaccattaagaccactctggcttgcctaaccagtgcggaccgtacaaccgttcaggctgtagcaagcgcaatcggtcgggccattgaggacgaggctcgcttcggtcgtatccgtgaccttgaagctaagcacttcaagaaaaacgttgaggaacaactcaacaagcgcgtagggcacgtctacaagaaagcatttatgcaagttgtcgaggctgacatgctctctaagggtctactcggtggcgaggcgtggtcttcgtggcataaggaagactctattcatgtaggagtacgctgcatcgagatgctcattgagtcaaccggaatggttagcttacaccgccaaaatgctggcgtagtaggtcaagactctgagactatcgaactcgcacctgaatacgctgaggctatcgcaacccgtgcaggtgcgctggctggcatctctccgatgttccaaccttgcgtagttcctcctaagccgtggactggcattactggtggtggctattgggctaacggtcgtcgtcctctggcgctggtgcgtactcacagtaagaaaggtctgatgcgctacgaagacgtttacatgcctgaggtgtacaaagcgattaacattgcgcaaaacaccgcctggtcgatcaacaagtgggtcctggcggtcgccaacgtaatcaccaagtggaagcattgtccggtccgggacatccctgcgattgagcgtgaagaactcccgatgaaaccggaagacatcgacatgaatcctgaggctctcaccgcgtggaaacgtgctaaagctgctgtgtaccgcagagacaaggctcgcaagtctcgccgtatcttgcttgagttcatgcttgagcaagccaataagtttgctaaccataaggccatctggttcccttacaacatggactggcgcggtcgtgtttacgctgtgtcaatgttcaacccgcaaggtaacgatatgaccaaaggactgcttacgctggcgaaaggtaaaccaatcggtaaggaaggttactactggctgaaaatccacggtgcaaactgtgcgggtgtcgataaggttccgttccctgagcgcatcaagttcattgaggaaaaccacgagaacatcatggcttgcgctaagtctccactggagaacacttggtgggctgagcaagatagtccgttctgcttccttgcgttctgctttgagtacgctggggtacagcaccacggcctgagctataactgctcccttccgctggcgtttgacgggtcttgctctggcatccagcacttctccgcgatgctccgagatgaggtaggtggtcgcgcggttaacttgcttcctagtgaaaccgttcaggacatctacgggattgttgctaagaaagtcaacgagattctacaagcagacgcaatcaatgggaccgataacgaagtagttaccgtgaccgatgagaacactggtgaaatctctgagaaagtcaagctgggcactaaggcactggctggtcaatggctggcttacggtgttactcgcagtgtgactaagcgttcagtcatgacgctggcttacgggtccaaagaattcggcttccgtcaacaagtgctggaagatactattcagtgggctattgattccggcaagggtctgatgttcactcagccgaatcaggctgctggatacatggctaagctgatttgggaatctgtgagcgtgacggtggtagctgcggttgaagcaatgaactggcttaagtctgctgctaagctgctggctgctgaggtcaaagataagaagactggagagattcttcgcaagcgttgcgctgtgcattgggtaactcctgatggtttccctgtgtggcaggaatacaagaagcctattcagacgcgcttgaacctgatgttcctcggtcagttccgcttacagcctaccattaacaccaacaaagatagcgagattgatgcacacaaacaggagtctggtatcgctcctaactttgtacacagccaagacggtagccaccttcgtaagactgtagtgtgggcacacgagaagtacggaatcgaatcttttgcactgattcacgactccttcggtaccattccggctgacgctgcgaacctgttcaaagcagtgcgcgaaactatggttgacacatatgagtcttgtgatgtactggctgatttctacgaccagttcgctgaccagttgcacgagtctcaattggacaaaatgccagcacttccggctaaaggtaacttgaacctccgtgacatcttagagtcggacttcgcgttcgcg

SEQ ID NO: 44 - protein, 890 aa, synthetic construct
  REGION 1..890: note = Variant of RNA polymerase
MHHHHHHMNTINIAKNDFSDIELAAIPFNTLADHYGEGLAREQLALEHESYEMGEARFRKMFERQLKAGEVADNAAAKPLITTLLPKMIARINDWFEEVKAKRGKRPTAFQFLQEIKPEAVAYITIKTTLACLTSADRTTVQAVASAIGRAIEDEARFGRIRDLEAKHFKKNVEEQLNKRVGHVYKKAFMQVVEADMLSKGLLGGEAWSSWHKEDSIHVGVRCIEMLIESTGMVSLHRQNAGVVGQDSETIELAPEYAEAIATRAGALAGISPMFQPCVVPPKPWTGITGGGYWANGRRPLALVRTHSKKGLMRYEDVYMPEVYKAINIAQNTAWSINKWVLAVANVITKWKHCPVRDIPAIEREELPMKPEDIDMNPEALTAWKRAKAAVYRRDKARKSRRILLEFMLEQANKFANHKAIWFPYNMDWRGRVYAVSMFNPQGNDMTKGLLTLAKGKPIGKEGYYWLKIHGANCAGVDKVPFPERIKFIEENHENIMACAKSPLENTWWAEQDSPFCFLAFCFEYAGVQHHGLSYNCSLPLAFDGSCSGIQHFSAMLRDEVGGRAVNLLPSETVQDIYGIVAKKVNEILQADAINGTDNEVVTVTDENTGEISEKVKLGTKALAGQWLAYGVTRSVTKRSVMTLAYGSKEFGFRQQVLEDTIQWAIDSGKGLMFTQPNQAAGYMAKLIWESVSVTVVAAVEAMNWLKSAAKLLAAEVKDKKTGEILRKRCAVHWVTPDGFPVWQEYKKPIQTRLNLMFLGQFRLQPTINTNKDSEIDAHKQESGIAPNFVHSQDGSHLRKTVVWAHEKYGIESFALIHDSFGTIPADAANLFKAVRETMVDTYESCDVLADFYDQFADQLHESQLDKMPALPAKGNLNLRDILESDFAFA

SEQ ID NO: 45 - DNA, 2670 bp, synthetic construct
  misc_feature 1..2670: note = Variant of RNA polymerase
  source 1..2670: mol_type = other DNA
atgcaccatcaccatcaccatatgaacacgattaacatcgctaagaacgacttctctgacatcgaactggctgctatcccgttcaacactctggctgaccattacggtgagggcttagctcgcgaacagttggcccttgagcatgagtcttacgagatgggtgaagcacgcttccgcaagatgtttgagcgtcaacttaaagctggtgaggttgcggataacgctgccgccaagcctctcatcactaccctactccctaagatgattgcacgcatcaacgactggtttgaggaagtgaaagctaagcgcggcaagcgcccgacagccttccagttcctgcaagaaatcaagccggaagccgtagcgtacatcaccattaagaccactctggcttgcctaaccagtgcggaccgtacaaccgttcaggctgtagcaagcgcaatcggtcgggccattgaggacgaggctcgcttcggtcgtatccgtgaccttgaagctaagcacttcaagaaaaacgttgaggaacaactcaacaagcgcgtagggcacgtctacaagaaagcatttatgcaagttgtcgaggctgacatgctctctaagggtctactcggtggcgaggcgtggtcttcgtggcataaggaagactctattcatgtaggagtacgctgcatcgagatgctcattgagtcaaccggaatggttagcttacaccgccaaaatgctggcgtagtaggtcaagactctgagactatcgaactcgcacctgaatacgctgaggctatcgcaacccgtgcaggtgcgctggctggcatctctccgatgttccaaccttgcgtagttcctcctaagccgtggactggcattactggtggtggctattgggctaacggtcgtcgtcctctggcgctggtgcgtactcacagtaagaaaggtctgatgcgctacgaagacgtttacatgcctgaggtgtacaaagcgattaacattgcgcaaaacaccgcctggtcgatcaacaagtgggtcctggcggtcgccaacgtaatcaccaagtggaagcattgtccggtccgggacatccctgcgattgagcgtgaagaactcccgatgaaaccggaagacatcgacatgaatcctgaggctctcaccgcgtggaaacgtgctaaagctgctgtgtaccgcaaggacaaggctcgcaagtctcgccgtatcttgcttgagttcatgcttgagcaagccaataagtttgctaaccataaggccatctggttcccttacaacatggactggcgcggtcgtgtttacgctgtgtcaatgttcaacccgcaaggtaacgatatgaccaaaggactgcttacgctggcgaaaggtaaaccaatcggtaaggaaggttactactggctgaaaatccacggtgcaaactgtgcgggtgtcgataaggttccgttccctgagcgcatcaagttcattgaggaaaaccacgagaacatcatggcttgcgctaagtctccactggagaacacttggtgggctgagcaagatagtccgttctgcttccttgcgttctgctttgagtacgctggggtacagcaccacggcctgagctataactgctcccttccgctggcgtttgacgggtcttgctctggcatccagcacttctccgcgatgctccgagatgaggtaggtggtcgcgcggttaacttgcttcctagtgaaaccgttcaggacatctacgggattgttgctaagaaagtcaacgagattctacaagcagacgcaatcaatgggaccgataacgaagtagttaccgtgaccgatgagaacactggtgaaatctctgagaaagtcaagctgggcactaaggcactggctggtcaatggctggcttacggtgttactcgcagtgtgactaagcgttcagtcatgacgctggcttacgggtccaaagagttcggcttccgtcaacaagtgctggaagatactattcagtgggctattgattccggcaagggtctgatgttcactcagccgaatcaggctgctggatacatggctaagctgatttgggaatctgtgagcgtgacggtggtagctgcggttgaagcaatgaactggcttaagtctgctgctaagctgctggctgctgaggtcaaagataagaagactggagagattcttcgcaagcgttgcgctgtgcattgggtaactcctgatggtttccctgtgtggcaggaatacaagaagcctattcagacgcgcttgaacctgatgttcctcggtcagttccgcttacagcctaccattaacaccaacaaagatagcgagattgatgcacacaaacaggagtctggtatcgctcctaactttgtacacagccaagacggtagccaccttcgtaagactgtagtgtgggcacacgagaagtacggaatcgaatcttttgcactgattcacgactccttcggtaccattccggctgacgctgcgaacctgttcaaagcagtgcgcgaaactatggttgacacatatgagtcttgtgatgtactggctgatttctacgaccagttcgctgaccagttgcacgagtctcaattggacaaaatgccagcacttccggctaaaggtaacttgaacctccgtgacatcttagagtcggacttcgcgttcgcg

SEQ ID NO: 46 - protein, 890 aa, synthetic construct
  REGION 1..890: note = Variant of RNA polymerase
MHHHHHHMNTINIAKNDFSDIELAAIPFNTLADHYGEGLAREQLALEHESYEMGEARFRKMFERQLKAGEVADNAAAKPLITTLLPKMIARINDWFEEVKAKRGKRPTAFQFLQEIKPEAVAYITIKTTLACLTSADRTTVQAVASAIGRAIEDEARFGRIRDLEAKHFKKNVEEQLNKRVGHVYKKAFMQVVEADMLSKGLLGGEAWSSWHKEDSIHVGVRCIEMLIESTGMVSLHRQNAGVVGQDSETIELAPEYAEAIATRAGALAGISPMFQPCVVPPKPWTGITGGGYWANGRRPLALVRTHSKKGLMRYEDVYMPEVYKAINIAQNTAWSINKWVLAVANVITKWKHCPVRDIPAIEREELPMKPEDIDMNPEALTAWKRAKAAVYRKDKARKSRRILLEFMLEQANKFANHKAIWFPYNMDWRGRVYAVSMFNPQGNDMTKGLLTLAKGKPIGKEGYYWLKIHGANCAGVDKVPFPERIKFIEENHENIMACAKSPLENTWWAEQDSPFCFLAFCFEYAGVQHHGLSYNCSLPLAFDGSCSGIQHFSAMLRDEVGGRAVNLLPSETVQDIYGIVAKKVNEILQADAINGTDNEVVTVTDENTGEISEKVKLGTKALAGQWLAYGVTRSVTKRSVMTLAYGSKEFGFRQQVLEDTIQWAIDSGKGLMFTQPNQAAGYMAKLIWESVSVTVVAAVEAMNWLKSAAKLLAAEVKDKKTGEILRKRCAVHWVTPDGFPVWQEYKKPIQTRLNLMFLGQFRLQPTINTNKDSEIDAHKQESGIAPNFVHSQDGSHLRKTVVWAHEKYGIESFALIHDSFGTIPADAANLFKAVRETMVDTYESCDVLADFYDQFADQLHESQLDKMPALPAKGNLNLRDILESDFAFA

SEQ ID NO: 47 - DNA, 2670 bp, synthetic construct
  misc_feature 1..2670: note = Variant of RNA polymerase
  source 1..2670: mol_type = other DNA
atgcaccatcaccatcaccatatgaacacgattaacatcgctaagaacgacttctctgacatcgaactggctgctatcccgttcaacactctggctgaccattacggtgagggcttagctcgcgaacagttggcccttgagcatgagtcttacgagatgggtgaagcacgcttccgcaagatgtttgagcgtcaacttaaagctggtgaggttgcggataacgctgccgccaagcctctcatcactaccctactccctaagatgattgcacgcatcaacgactggtttgaggaagtgaaagctaagcgcggcaagcgcccgacagccttccagttcctgcaagaaatcaagccggaagccgtagcgtacatcaccattaagaccactctggcttgcctaaccagtgcggaccgtacaaccgttcaggctgtagcaagcgcaatcggtcgggccattgaggacgaggctcgcttcggtcgtatccgtgaccttgaagctaagcacttcaagaaaaacgttgaggaacaactcaacaagcgcgtagggcacgtctacaagaaagcatttatgcaagttgtcgaggctgacatgctctctaagggtctactcggtggcgaggcgtggtcttcgtggcataaggaagactctattcatgtaggagtacgctgcatcgagatgctcattgagtcaaccggaatggttagcttacaccgccaaaatgctggcgtagtaggtcaagactctgagactatcgaactcgcacctgaatacgctgaggctatcgcaacccgtgcaggtgcgctggctggcatctctccgatgttccaaccttgcgtagttcctcctaagccgtggactggcattactggtggtggctattgggctaacggtcgtcgtcctctggcgctggtgcgtactcacagtaagaaaggtctgatgcgctacgaagacgtttacatgcctgaggtgtacaaagcgattaacattgcgcaaaacaccgcctggtcgatcaacaagtgggtcctggcggtcgccaacgtaatcaccaagtggaagcattgtccggtccgtgacatccctgcgattgagcgtgaagaactcccgatgaaaccggaagacatcgacatgaatcctgaggctctcaccgcgtggaaacgtgctaaagctgctgtgtaccgcaaggacaaggctcgcaagtctcgccgtatcttgcttgagttcatgcttgagcaagccaataagtttgctaaccataaggccatctggttcccttacaacatggactggcgcggtcgtgtttacgctgtgtcaatgttcaatccgcaaggtaacgatatgaccaaaggactgcttacgctggcgaaaggtaaaccaatcggtaaggaaggttactactggctgaaaatccacggtgcaaactgtgcgggtgtcgataaggttccgttccctgagcgcatcaagttcattgaggaaaaccacgagaacatcatggcttgcgctaagtctccactggagaacacttggtgggctgagcaagatagtccgttctgcttccttgcgttctgctttgagtacgctggggtacagcaccacggcctgagctataactgctcccttccgctggcgtttgacgggtcttgctctggcatccagcacttctccgcgatgctccgagatgaggtaggtggtcgcgcggttaacttgcttcctagtgaaaccgttcaggacatctacgggattgttgctaagaaagtcaacgagattctacaagcagacgcaatcaatgggaccgataacgaagtagttaccgtgaccgatgagaacactggtgaaatctctgagaaagtcaagctgggcactaaggcactggctggtcaatggctggcttacggtgttactcgcagtgtgactaagcgttcagtcatgacgctggcttacgggtccaaagaattcggcttccgtcaacaagtgctggaagataccattcagccggctattgattccggcaagggtctgatgttcactcagccgaatcaggctgctggatacatggctaagctgatttgggaatctgtgagcgtgacggtggtagctgcggttgaagcaatgaactggcttaagtctgctgctaagctgctggctgctgaggtcaaagataagaagactggagagattcttcgcaagcgttgcgctgtgcattgggtaactcctgatggtttccctgtgtggcaggaatacaagaagcctattcagacgcgcttgaacctgatgttcctcggtcagttccgcttacagcctaccattaacaccaacaaagatagcgagattgatgcacacaaacaggagtctggtatcgctcctaactttgtacacagccaagacggtagccaccttcgtaagactgtagtgtgggcacacgagaagtacggaatcgaatcttttgcactgattcacgactccttcggtaccattccggctgacgctgcgaacctgttcaaagcagtgcgcgaaactatggttgacacatatgagtcttgtgatgtactggctgatttctacgaccagttcgctgaccagttgcacgagtctcaattggacaaaatgccagcacttccggctaaaggtaacttgaacctccgtgacatcttagagtcggacttcgcgttcgcg

SEQ ID NO: 48 - protein, 890 aa, synthetic construct
  REGION 1..890: note = Variant of RNA polymerase
MHHHHHHMNTINIAKNDFSDIELAAIPFNTLADHYGEGLAREQLALEHESYEMGEARFRKMFERQLKAGEVADNAAAKPLITTLLPKMIARINDWFEEVKAKRGKRPTAFQFLQEIKPEAVAYITIKTTLACLTSADRTTVQAVASAIGRAIEDEARFGRIRDLEAKHFKKNVEEQLNKRVGHVYKKAFMQVVEADMLSKGLLGGEAWSSWHKEDSIHVGVRCIEMLIESTGMVSLHRQNAGVVGQDSETIELAPEYAEAIATRAGALAGISPMFQPCVVPPKPWTGITGGGYWANGRRPLALVRTHSKKGLMRYEDVYMPEVYKAINIAQNTAWSINKWVLAVANVITKWKHCPVRDIPAIEREELPMKPEDIDMNPEALTAWKRAKAAVYRKDKARKSRRILLEFMLEQANKFANHKAIWFPYNMDWRGRVYAVSMFNPQGNDMTKGLLTLAKGKPIGKEGYYWLKIHGANCAGVDKVPFPERIKFIEENHENIMACAKSPLENTWWAEQDSPFCFLAFCFEYAGVQHHGLSYNCSLPLAFDGSCSGIQHFSAMLRDEVGGRAVNLLPSETVQDIYGIVAKKVNEILQADAINGTDNEVVTVTDENTGEISEKVKLGTKALAGQWLAYGVTRSVTKRSVMTLAYGSKEFGFRQQVLEDTIQPAIDSGKGLMFTQPNQAAGYMAKLIWESVSVTVVAAVEAMNWLKSAAKLLAAEVKDKKTGEILRKRCAVHWVTPDGFPVWQEYKKPIQTRLNLMFLGQFRLQPTINTNKDSEIDAHKQESGIAPNFVHSQDGSHLRKTVVWAHEKYGIESFALIHDSFGTIPADAANLFKAVRETMVDTYESCDVLADFYDQFADQLHESQLDKMPALPAKGNLNLRDILESDFAFA

SEQ ID NO: 49 - DNA, 2670 bp, synthetic construct
  misc_feature 1..2670: note = Variant of RNA polymerase
  source 1..2670: mol_type = other DNA
atgcaccatcaccatcaccatatgaacacgattaacatcgctaagaacgacttctctgacatcgaactggctgctatcccgttcaacactctggctgaccattacggtgagcgcttagctcgcgaacagttggcccttgagcatgagtcttacgagatgggtgaagcacgcttccgcaagatgtttgagcgtcaacttaaagctggtgaggttgcggataacgctgccgccaagcctctcatcactaccctactccctaagatgattgcacgcatcaacgactggtttgaggaagtgaaagctaagcgcggcaagcgcccgacagccttccagttcctgcaagaaatcaagccggaagccgtagcgtacatcaccattaagaccactctggcttgcctaaccagtgcggaccgtacaaccgttcaggctgtagcaagcgcaatcggtcgggccattgaggacgaggctcgcttcggtcgtatccgtgaccttgaagctaagcacttcaagaaaaacgttgaggaacaactcaacaagcgcgtagggcacgtctacaagaaagcatttatgcaagttgtcgaggctgacatgctctctaagggtctactcggtggcgaggcgtggtcttcgtggcataaggaagactctattcatgtaggagtacgctgcatcgagatgctcattgagtcaaccggaatggttagcttacaccgccaaaatgctggcgtagtaggtcaagactctgagactatcgaactcgcacctgaatacgctgaggctatcgcaacccgtgcaggtgcgctggctggcatctctccgatgttccaaccttgcgtagttcctcctaagccgtggactggcattactggtggtggctattgggctaacggtcgtcgtcctctggcgctggtgcgtactcacagtaagaaaggtctgatgcgctacgaagacgtttacatgcctgaggtgtacaaagcgattaacattgcgcaaaacaccgcctggtcgatcaacaagtgggtcctggcggtcgccaacgtaatcaccaagtggaagcattgtccggtccgtgacatccctgcgattgagcgtgaagaactcccgatgaaaccggaagacatcgacatgaatcctgaggctctcaccgcgtggaaacgtgctaaagctgctgtgtaccgcaaggacaaggctcgcaagtctcgccgtatcttgcttgagttcatgcttgagcaagccaataagtttgctaaccataaggccatctggttcccttacaacatggactggcgcggtcgtgtttacgctgtgtcaatgttcaatccgcaaggtaacgatatgaccaaaggactgcttacgctggcgaaaggtaaaccaatcggtaaggaaggttactactggctgaaaatccacggtgcaaactgtgcgggtgtcgataaggttccgttccctgagcgcatcaagttcattgaggaaaaccacgagaacatcatggcttgcgctaagtctccactggagaacacttggtgggctgagcaagatagtccgttctgcttccttgcgttctgctttgagtacgctggggtacagcaccacggcctgagctataactgctcccttccgctggcgtttgacgggtcttgctctggcatccagcacttctccgcgatgctccgagatgaggtaggtggtcgcgcggttaacttgcttcctagtgaaaccgttcaggacatctacgggattgttgctaagaaagtcaacgagattctacaagcagacgcaatcaatgggaccgataacgaagtagttaccgtgaccgatgagaacactggtgaaatctctgagaaagtcaagctgggcactaaggcactggctggtcaatggctggcttacggtgttactcgcagtgtgactaagcgttcagtcatgacgctggcttacgggtccaaagaattcggcttccgtcaacaagtgctggaagatactattcagtgggctattgattccggcaagggtctgatgttcactcagccgaatcaggctgctggatacatggctaagctgatttgggaatctgtgagcgtgacggtggtagctgcggttgaagcaatgaactggcttaagtctgctgctaagctgctggctgctgaggtcaaagataagaagactggagagattcttcgcaagcgttgcgctgtgcattgggtaactcctgatggtttccctgtgtggcaggaatacaagaagcctattcagacgcgcttgaacctgatgttcctcggtcagttccgcttacagcctaccattaacaccaacaaagatagcgagattgatgcacacaaacaggagtctggtatcgctcctaactttgtacacagccaagacggtagccaccttcgtaagactgtagtgtgggcacacgagaagtacggaatcgaatcttttgcactgattcacgactccttcggtaccattccggctgacgctgcgaacctgttcaaagcagtgcgcgaaactatggttgacacatatgagtcttgtgatgtactggctgatttctacgaccagttcgctgaccagttgcacgagtctcaattggacaaaatgccagcacttccggctaaatgtaacttgaacctccgtgacatcttagagtcggacttcgcgttcgcg

SEQ ID NO: 50 - protein, 890 aa, synthetic construct
  REGION 1..890: note = Variant of RNA polymerase
MHHHHHHMNTINIAKNDFSDIELAAIPFNTLADHYGERLAREQLALEHESYEMGEARFRKMFERQLKAGEVADNAAAKPLITTLLPKMIARINDWFEEVKAKRGKRPTAFQFLQEIKPEAVAYITIKTTLACLTSADRTTVQAVASAIGRAIEDEARFGRIRDLEAKHFKKNVEEQLNKRVGHVYKKAFMQVVEADMLSKGLLGGEAWSSWHKEDSIHVGVRCIEMLIESTGMVSLHRQNAGVVGQDSETIELAPEYAEAIATRAGALAGISPMFQPCVVPPKPWTGITGGGYWANGRRPLALVRTHSKKGLMRYEDVYMPEVYKAINIAQNTAWSINKWVLAVANVITKWKHCPVRDIPAIEREELPMKPEDIDMNPEALTAWKRAKAAVYRKDKARKSRRILLEFMLEQANKFANHKAIWFPYNMDWRGRVYAVSMFNPQGNDMTKGLLTLAKGKPIGKEGYYWLKIHGANCAGVDKVPFPERIKFIEENHENIMACAKSPLENTWWAEQDSPFCFLAFCFEYAGVQHHGLSYNCSLPLAFDGSCSGIQHFSAMLRDEVGGRAVNLLPSETVQDIYGIVAKKVNEILQADAINGTDNEVVTVTDENTGEISEKVKLGTKALAGQWLAYGVTRSVTKRSVMTLAYGSKEFGFRQQVLEDTIQWAIDSGKGLMFTQPNQAAGYMAKLIWESVSVTVVAAVEAMNWLKSAAKLLAAEVKDKKTGEILRKRCAVHWVTPDGFPVWQEYKKPIQTRLNLMFLGQFRLQPTINTNKDSEIDAHKQESGIAPNFVHSQDGSHLRKTVVWAHEKYGIESFALIHDSFGTIPADAANLFKAVRETMVDTYESCDVLADFYDQFADQLHESQLDKMPALPAKCNLNLRDILESDFAFA

SEQ ID NO: 51 - DNA, 2670 bp, synthetic construct
  misc_feature 1..2670: note = Variant of RNA polymerase
  source 1..2670: mol_type = other DNA
atgcaccatcaccatcaccatatgaacacgattaacatcgctaagaacgacttctctgacatcgaactggctgctatcccgttcaacactctggctgaccattacggtgagcgcttagctcgcgaacagttggcccttgagcatgagtcttacgagatgggtgaagcacgcttccgcaagatgtttgagcgtcaacttaaagctggtgaggttgcggataacgctgccgccaagcctctcatcactaccctactccctaagatgattgcacgcatcaacgactggtttgaggaagtgaaagctaagcgcggcaagcgcccgacagccttccagttcctgcaagaaatcaagccggaagccgtagcgtacatcaccattaagaccactctggcttgcctaaccagtgcggaccgtacaaccgttcaggctgtagcaagcgcaatcggtcgggccattgaggacgaggctcgcttcggtcgtatccgtgaccttgaagctaagcacttcaagaaaaacgttgaggaacaactcaacaagcgcgtagggcacgtctacaagaaagcatttatgcaagttgtcgaggctgacatgctctctaagggtctactcggtggcgaggcgtggtcttcgtggcataaggaagactctattcatgtaggagtacgctgcatcgagatgctcattgagtcaaccggaatggttagcttacaccgccaaaatgctggcgtagtaggtcaagactctgagactatcgaactcgcacctgaatacgctgaggctatcgcaacccgtgcaggtgcgctggctggcatctctccgatgttccaaccttgcgtagttcctcctaagccgtggactggcattactggtggtggctattgggctaacggtcgtcgtcctctggcgctggtgcgtactcacagtaagaaaggtctgatgcgctacgaagacgtttacatgcctgaggtgtacaaagcgattaacattgcgcaaaacaccgcctggtcgatcaacaagtgggtcctggcggtcgccaacgtaatcaccaagtggaagcattgtccggtccgggacatccctgcgattgagcgtgaagaactcccgatgaaaccggaagacatcgacatgaatcctgaggctctcaccgcgtggaaacgtgctaaagctgctgtgtaccgcaaggacaaggctcgcaagtctcgccgtatcttgcttgagttcatgcttgagcaagccaataagtttgctaaccataaggccatctggttcccttacaacatggactggcgcggtcgtgtttacgctgtgtcaatgttcaatccgcaaggtaacgatatgaccaaaggactgcttacgctggcgaaaggtaaaccaatcggtaaggaaggttactactggctgaaaatccacggtgcaaactgtgcgggtgtcgataaggttccgttccctgagcgcatcaagttcattgaggaaaaccacgagaacatcatggcttgcgctaagtctccactggagaacacttggtgggctgagcaagatagtccgttctgcttccttgcgttctgctttgagtacgctggggtacagcaccacggcctgagctataactgctcccttccgctggcgtttgacgggtcttgctctggcatccagcacttctccgcgatgctccgagatgaggtaggtggtcgcgcggttaacttgcttcctagtgaaaccgttcaggacatctacgggattgttgctaagaaagtcaacgagattctacaagcagacgcaatcaatgggaccgataacgaagtagttaccgtgaccgatgagaacactggtgaaatctctgagaaagtcaagctgggcactaaggcactggctggtcaatggctggcttacggtgttactcgcagtgtgactaagcgttcagtcatgacgctggcttacgggtccaaagagttcggcttccgtcaacaagtgctggaagatactattcagtgggctattgattccggcaagggtctgatgttcactcagccgaatcaggctgctggatacatggctaagctgatttgggaatctgtgagcgtgacggtggtagctgcggttgaagcaatgaactggcttaagtctgctgctaagctgctggctgctgaggtcaaagataagaagactggagagattcttcgcaagcgttgcgctgtgcattgggtaactcctgatggtttccctgtgtggcaggaatacaagaagcctattcagacgcgcttgaacctgatgttcctcggtcagttccgcttacagcctaccattaacaccaacaaagatagcgagattgatgcacacaaacaggagtctggtatcgctcctaactttgtacacagccaagacggtagccaccttcgtaagactgtagtgtgggcacacgagaagtacggaatcgaatcttttgcactgattcacgactccttcggtaccattccggctgacgctgcgaacctgttcaaagcagtgcgcgaaactatggttgacacatatgagtcttgtgatgtactggctgatttctacgaccagttcgctgaccagttgcacgagtctcaattggacaaaatgccagcacttccggctaaaggtaacttgaacctccgtgacatcttagagtcggacttcgcgttcgcg

SEQ ID NO: 52 - protein, 890 aa, synthetic construct
  REGION 1..890: note = Variant of RNA polymerase
MHHHHHHMNTINIAKNDFSDIELAAIPFNTLADHYGERLAREQLALEHESYEMGEARFRKMFERQLKAGEVADNAAAKPLITTLLPKMIARINDWFEEVKAKRGKRPTAFQFLQEIKPEAVAYITIKTTLACLTSADRTTVQAVASAIGRAIEDEARFGRIRDLEAKHFKKNVEEQLNKRVGHVYKKAFMQVVEADMLSKGLLGGEAWSSWHKEDSIHVGVRCIEMLIESTGMVSLHRQNAGVVGQDSETIELAPEYAEAIATRAGALAGISPMFQPCVVPPKPWTGITGGGYWANGRRPLALVRTHSKKGLMRYEDVYMPEVYKAINIAQNTAWSINKWVLAVANVITKWKHCPVRDIPAIEREELPMKPEDIDMNPEALTAWKRAKAAVYRKDKARKSRRILLEFMLEQANKFANHKAIWFPYNMDWRGRVYAVSMFNPQGNDMTKGLLTLAKGKPIGKEGYYWLKIHGANCAGVDKVPFPERIKFIEENHENIMACAKSPLENTWWAEQDSPFCFLAFCFEYAGVQHHGLSYNCSLPLAFDGSCSGIQHFSAMLRDEVGGRAVNLLPSETVQDIYGIVAKKVNEILQADAINGTDNEVVTVTDENTGEISEKVKLGTKALAGQWLAYGVTRSVTKRSVMTLAYGSKEFGFRQQVLEDTIQWAIDSGKGLMFTQPNQAAGYMAKLIWESVSVTVVAAVEAMNWLKSAAKLLAAEVKDKKTGEILRKRCAVHWVTPDGFPVWQEYKKPIQTRLNLMFLGQFRLQPTINTNKDSEIDAHKQESGIAPNFVHSQDGSHLRKTVVWAHEKYGIESFALIHDSFGTIPADAANLFKAVRETMVDTYESCDVLADFYDQFADQLHESQLDKMPALPAKGNLNLRDILESDFAFA

SEQ ID NO: 53 - DNA, 2670 bp, synthetic construct
  misc_feature 1..2670: note = Variant of RNA polymerase
  source 1..2670: mol_type = other DNA
atgcaccatcaccatcaccatatgaacacgattaacatcgctaagaacgacttctctgacatcgaactggctgctatcccgttcaacactctggctgaccattacggtgagggcttagctcgcgaacagttggcccttgagcatgagtcttacgagatgggtgaagcacgcttccgcaagatgtttgagcgtcaacttaaagctggtgaggttgcggataacgctgccgccaagcctctcatcactaccctactccctaagatgattgcacgcatcaacgactggtttgaggaagtgaaagctaagcgcggcaagcgcccgacagccttccagttcctgcaagaaatcaagccggaagccgtagcgtacttcaccattaagaccactctggcttgcctaaccagtgcggaccgtacaaccgttcaggctgtagcaagcgcaatcggtcgggccattgaggacgaggctcgcttcggtcgtatccgtgaccttgaagctaagcacttcaagaaaaacgttgaggaacaactcaacaagcgcgtagggcacgtctacaagaaagcatttatgcaagttgtcgaggctgacatgctctctaagggtctactcggtggcgaggcgtggtcttcgtggcataaggaagactctattcatgtaggagtacgctgcatcgagatgctcattgagtcaaccggaatggttagcttacaccgccaaaatgctggcgtagtaggtcaagactctgagactatcgaactcgcacctgaatacgctgaggctatcgcaacccgtgcaggtgcgctggctggcatctctccgatgttccaaccttgcgtagttcctcctaagccgtggactggcattactggtggtggctattgggctaacggtcgtcgtcctctggcgctggtgcgtactcacagtaagaaaggtctgatgcgctacgaagacgtttacatgcctgaggtgtacaaagcgattaacattgcgcaaaacaccgcctggtcgatcaacaagtgggtcctggcggtcgccaacgtaatcaccaagtggaagcattgtccggtccgtgacatccctgcgattgagcgtgaagaactcccgatgaaaccggaagacatcgacatgaatcctgaggctctcaccgcgtggaaacgtgctaaagctgctgtgtaccgcaaggacaaggctcgcaagtctcgccgtatcttgcttgagttcatgcttgagcaagccaataagtttgctaaccataaggccatctggttcccttacaacatggactggcgcggtcgtgtttacgctgtgtcaatgttcaatccgcaaggtaacgatatgaccaaaggactgcttacgctggcgaaaggtaaaccaatcggtaaggaaggttactactggctgaaaatccacggtgcaaactgtgcgggtgtcgataaggttccgttccctgagcgcatcaagttcattgaggaaaaccacgagaacatcatggcttgcgctaagtctccactggagaacacttggtgggctgagcaagatatcccgttctgcttccttgcgttctgctttgagtacgctggggtacagcaccacggcctgagctataactgctcccttccgctggcgtttgacgggtcttgctctggcatccagcacttctccgcgatgctccgagatgaggtaggtggtcgcgcggttaacttgcttcctagtgaaaccgttcaggacatctacgggattgttgctaagaaagtcaacgagattctacaagcagacgcaatcaatgggaccgataacgaagtagttaccgtgaccgatgagaacactggtgaaatctctgagaaagtcaagctgggcactaaggcactggctggtcaatggctggcttacggtgttactcgcagtgtgactaagcgttcagtcatgacgctggcttacgggtccaaagaattcggcttccgtcaacaagtgctggaagataccattcagtgggctattgattccggcaagggtctgatgttcactcagccgaatcaggctgctggatacatggctaagctgatttgggaatctgtgagcgtgacggtggtagctgcggttgaagcaatgaactggcttaagtctgctgctaagctgctggctgctgaggtcaaagataagaagactggagagattcttcgcaagcgttgcgctgtgcattgggtaactcctgatggtttccctgtgtggcaggaatacaagaagcctattcagacgcgcttgaacctgatgttcctcggtcagttccgcttacagcctaccattaacaccaacaaagatagcgagattgatgcacacaaacaggagtctggtatcgctcctaactttgtacacagccaagacggtagccaccttcgtaagactgtagtgtgggcacacgagaagtacggaatcgaatcttttgcactgattcacgactccttcggtaccattccggctgacgctgcgaacctgttcaaagcagtgcgcgaaactatggttgacacatatgagtcttgtgatgtactggctgatttctacgaccagttcgctgaccagttgcacgagtctcaattggacaaaatgccagcacttccggctaaaggtaacttgaacctccgtgacatcttagagtcggacttcgcgttcgcg

SEQ ID NO: 54 - protein, 890 aa, synthetic construct
  REGION 1..890: note = Variant of RNA polymerase
MHHHHHHMNTINIAKNDFSDIELAAIPFNTLADHYGEGLAREQLALEHESYEMGEARFRKMFERQLKAGEVADNAAAKPLITTLLPKMIARINDWFEEVKAKRGKRPTAFQFLQEIKPEAVAYFTIKTTLACLTSADRTTVQAVASAIGRAIEDEARFGRIRDLEAKHFKKNVEEQLNKRVGHVYKKAFMQVVEADMLSKGLLGGEAWSSWHKEDSIHVGVRCIEMLIESTGMVSLHRQNAGVVGQDSETIELAPEYAEAIATRAGALAGISPMFQPCVVPPKPWTGITGGGYWANGRRPLALVRTHSKKGLMRYEDVYMPEVYKAINIAQNTAWSINKWVLAVANVITKWKHCPVRDIPAIEREELPMKPEDIDMNPEALTAWKRAKAAVYRKDKARKSRRILLEFMLEQANKFANHKAIWFPYNMDWRGRVYAVSMFNPQGNDMTKGLLTLAKGKPIGKEGYYWLKIHGANCAGVDKVPFPERIKFIEENHENIMACAKSPLENTWWAEQDIPFCFLAFCFEYAGVQHHGLSYNCSLPLAFDGSCSGIQHFSAMLRDEVGGRAVNLLPSETVQDIYGIVAKKVNEILQADAINGTDNEVVTVTDENTGEISEKVKLGTKALAGQWLAYGVTRSVTKRSVMTLAYGSKEFGFRQQVLEDTIQWAIDSGKGLMFTQPNQAAGYMAKLIWESVSVTVVAAVEAMNWLKSAAKLLAAEVKDKKTGEILRKRCAVHWVTPDGFPVWQEYKKPIQTRLNLMFLGQFRLQPTINTNKDSEIDAHKQESGIAPNFVHSQDGSHLRKTVVWAHEKYGIESFALIHDSFGTIPADAANLFKAVRETMVDTYESCDVLADFYDQFADQLHESQLDKMPALPAKGNLNLRDILESDFAFA

SEQ ID NO: 55 - DNA, 2670 bp, synthetic construct
  misc_feature 1..2670: note = Variant of RNA polymerase
  source 1..2670: mol_type = other DNA
atgcaccatcaccatcaccatatgaacacgattaacatcgctaagaacgacttctctgacatcgaactggctgctatcccgttcaacactctggctgaccattacggtgagcgtttagctcgcgaacagttggcccttgagcatgagtcttacgagatgggtgaagcacgcttccgcaagatgtttgagcgtcaacttaaagctggtgaggttgcggataacgctgccgccaagcctctcatcactaccctactccctaagatgattgcacgcatcaacgactggtttgaggaagtgaaagctaagcgcggcaagcgcccgacagccttccagttcctgcaagaaatcaagccggaagccgtagcgtacatcaccattaagaccactctggcttgcctaaccagtgcggaccgtacaaccgttcaggctgtagcaagcgcaatcggtcgggccattgaggacgaggctcgcttcggtcgtatccgtgaccttgaagctaagcacttcaaggagaacgttgaggaacaactcaacaagcgcgtagggcacgtctacaagaaagcatttatgcaagttgtcgaggctgacatgctctctaagggtctactcggtggcgaggcgtggtcttcgtggcataaggaagactctattcatgtaggagtacgctgcatcgagatgctcattgagtcaaccggaatggttagcttacaccgccaaaatgctggcgtagtaggtcaagactctgagactatcgaactcgcacctgaatacgctgaggctatcgcaacccgtgcaggtgcgctggctggcatctctccgatgttccaaccttgcgtagttcctcctaagccgtggactggcattactggtggtggctattgggctaacggtcgtcgtcctctggcgctggtgcgtactcacagtaagaaaggtctgatgcgctacgaagacgtttacatgcctgaggtgtacaaagcgattaacattgcgcaaaacaccgcctggtcgatcaacaagtgggtcctggcggtcgccaacgtaatcaccaagtggaagcattgtccggtccgggacatccctgcgattgagcgtgaagaactcccgatgaaaccggaagacatcgacatgaatcctgaggctctcaccgcgtggaaacgtgctaaagctgctgtgtaccgcagagacaaggctcgcaagtctcgccgtatcttgcttgagttcatgcttgagcaagccaataagtttgctaaccataaggccatctggttcccttacaacatggactggcgcggtcgtgtttacgctgtgtcaatgttcaacccgcaaggtaacgatatgaccaaaggactgcttacgctggcgaaaggtaaaccaatcggtaaggaaggttactactggctgaaaatccacggtgcaaactgtgcgggtgtcgataaggttccgttccctgagcgcatcaagttcattgaggaaaaccacgagaacatcatggcttgcgctaagtctccactggagaacacttggtgggctgagcaagatctcccgttctgcttccttgcgttctgctttgagtacgctggggtacagcaccacggcctgagctataactgctcccttccgctggcgtttgacgggtcttgctctggcatccagcacttctccgcgatgctccgagatgaggtaggtggtcgcgcggttaacttgcttcctagtgaaaccgttcaggacatctacgggattgttgctaagaaagtcaacgagattctacaagcagacgcaatcaatgggaccgataacgaagtagttaccgtgaccgatgagaacactggtgaaatctctgagaaagtcaagctgggcactaaggcactggctggtcaatggctggcttacggtgttactcgcagtgtgactaagcgttcagtcatgacgctggcttacgggtccaaagagttcggcttccgtcaacaagtgctggaagatactattcagtgggctattgattccggcaagggtctgatgttcactcagccgaatcaggctgctggatacatggctaagctgatttgggaatctgtgagcgtgacggtggtagctgcggttgaagcaatgaactggcttaagtctgctgctaagctgctggctgctgaggtcaaagataagaagactggagagattcttcgcaagcgttgcgctgtgcattgggtaactcctgatggtttccctgtgtggcaggaatacaagaagcctattcagacgcgcttgaacctgatgttcctcggtcagttccgcttacagcctaccattaacaccaacaaagatagcgagattgatgcacacaaacaggagtctggtatcgctcctaactttgtacacagccaagacggtagccaccttcgtaagactgtagtgtgggcacacgagaagtacggaatcgaatcttttgcactgattcacgactccttcggtaccattccggctgacgctgcgaacctgttcaaagcagtgcgcgaaactatggttgacacatatgagtcttgtgatgtactggctgatttctacgaccagttcgctgaccagttgcacgagtctcaattggacaaaatgccagcacttccggctaaaggtaacttgatgctccgtgacatcttagagtcggacttcgcgttcgcg

SEQ ID NO: 56 - protein, 890 aa, synthetic construct
  REGION 1..890: note = Variant of RNA polymerase
MHHHHHHMNTINIAKNDFSDIELAAIPFNTLADHYGERLAREQLALEHESYEMGEARFRKMFERQLKAGEVADNAAAKPLITTLLPKMIARINDWFEEVKAKRGKRPTAFQFLQEIKPEAVAYITIKTTLACLTSADRTTVQAVASAIGRAIEDEARFGRIRDLEAKHFKENVEEQLNKRVGHVYKKAFMQVVEADMLSKGLLGGEAWSSWHKEDSIHVGVRCIEMLIESTGMVSLHRQNAGVVGQDSETIELAPEYAEAIATRAGALAGISPMFQPCVVPPKPWTGITGGGYWANGRRPLALVRTHSKKGLMRYEDVYMPEVYKAINIAQNTAWSINKWVLAVANVITKWKHCPVRDIPAIEREELPMKPEDIDMNPEALTAWKRAKAAVYRRDKARKSRRILLEFMLEQANKFANHKAIWFPYNMDWRGRVYAVSMFNPQGNDMTKGLLTLAKGKPIGKEGYYWLKIHGANCAGVDKVPFPERIKFIEENHENIMACAKSPLENTWWAEQDLPFCFLAFCFEYAGVQHHGLSYNCSLPLAFDGSCSGIQHFSAMLRDEVGGRAVNLLPSETVQDIYGIVAKKVNEILQADAINGTDNEVVTVTDENTGEISEKVKLGTKALAGQWLAYGVTRSVTKRSVMTLAYGSKEFGFRQQVLEDTIQWAIDSGKGLMFTQPNQAAGYMAKLIWESVSVTVVAAVEAMNWLKSAAKLLAAEVKDKKTGEILRKRCAVHWVTPDGFPVWQEYKKPIQTRLNLMFLGQFRLQPTINTNKDSEIDAHKQESGIAPNFVHSQDGSHLRKTVVWAHEKYGIESFALIHDSFGTIPADAANLFKAVRETMVDTYESCDVLADFYDQFADQLHESQLDKMPALPAKGNLMLRDILESDFAFA

SEQ ID NO: 57 - DNA, 2670 bp, synthetic construct
  misc_feature 1..2670: note = Variant of RNA polymerase
  source 1..2670: mol_type = other DNA
atgcaccatcaccatcaccatatgaacacgattaacatcgctaagaacgacttctctgacatcgaactggctgctatcccgttcaacactctggctgaccattacggtgagcgtttagctcgcgaacagttggcccttgagcatgagtcttacgagatgggtgaagcacgcttccgcaagatgtttgagcgtcaacttaaagctggtgaggttgcggataacgctgccgccaagcctctcatcactaccctactccctaagatgattgcacgcatcaacgactggtttgaggaagtgaaagctaagcgcggcaagcgcccgacagccttccagttcctgcaagaaatcaagccggaagccgtagcgtacatcaccattaagaccactctggcttgcctaaccagtgcggaccgtacaaccgttcaggctgtagcaagcgcaatcggtcgggccattgaggacgaggctcgcttcggtcgtatccgtgaccttgaagctaagcacttccagaaaaacgttgaggaacaactcaacaagcgcgtagggcacgtctacaagaaagcatttatgcaagttgtcgaggctgacatgctctctaagggtctactcggtggcgaggcgtggtcttcgtggcataaggaagactctattcatgtaggagtacgctgcatcgagatgctcattgagtcaaccggaatggttagcttacaccgccaaaatgctggcgtagtaggtcaagactctgagactatcgaactcgcacctgaatacgctgaggctatcgcaacccgtgcaggtgcgctggctggcatctctccgatgttccaaccttgcgtagttcctcctaagccgtggactggcattactggtggtggctattgggctaacggtcgtcgtcctctggcgctggtgcgtactcacagtaagaaaggtctgatgcgctacgaagacgtttacatgcctgaggtgtacaaagcgattaacattgcgcaaaacaccgcctggtcgatcaacaagtgggtcctggcggtcgccaacgtaatcaccaagtggaagcattgtccggtccgggacatccctgcgattgagcgtgaagaactcccgatgaaaccggaagacatcgacatgaatcctgaggctctcaccgcgtggaaacgtgctaaagctgctgtgtaccgcagagacaaggctcgcaagtctcgccgtatcttgcttgagttcatgcttgagcaagccaataagtttgctaaccataaggccatctggttcccttacaacatggactggcgcggtcgtgtttacgctgtgtcaatgttcaacccgcaaggtaacgatatgaccaaaggactgcttacgctggcgaaaggtaaaccaatcggtaaggaaggttactactggctgaaaatccacggtgcaaactgtgcgggtgtcgataaggttccgttccctgagcgcatcaagttcattgaggaaaaccacgagaacatcatggcttgcgctaagtctccactggagaacacttggtgggctgagcaagatctcccgttctgcttccttgcgttctgctttgagtacgctggggtacagcaccacggcctgagctataactgctcccttccgctggcgtttgacgggtcttgctctggcatccagcacttctccgcgatgctccgagatgaggtaggtggtcgcgcggttaacttgcttcctagtgaaaccgttcaggacatctacgggattgttgctaagaaagtcaacgagattctacaagcagacgcaatcaatgggaccgataacgaagtagttaccgtgaccgatgagaacactggtgaaatctctgagaaagtcaagctgggcactaaggcactggctggtcaatggctggcttacggtgttactcgcagtgtgactaagcgttcagtcatgacgctggcttacgggtccaaagagttcggcttccgtcaacaagtgctggaagatactattcagtgggctattgattccggcaagggtctgatgttcactcagccgaatcaggctgctggatacatggctaagctgatttgggaatctgtgagcgtgacggtggtagctgcggttgaagcaatgaactggcttaagtctgctgctaagctgctggctgctgaggtcaaagataagaagactggagagattcttcgcaagcgttgcgctgtgcattgggtaactcctgatggtttccctgtgtggcaggaatacaagaagcctattcagacgcgcttgaacctgatgttcctcggtcagttccgcttacagcctaccattaacaccaacaaagatagcgagattgatgcacacaaacaggagtctggtatcgctcctaactttgtacacagccaagacggtagccaccttcgtaagactgtagtgtgggcacacgagaagtacggaatcgaatcttttgcactgattcacgactccttcggtaccattccggctgacgctgcgaacctgttcaaagcagtgcgcgaaactatggttgacacatatgagtcttgtgatgtactggctgatttctacgaccagttcgctgaccagttgcacgagtctcaattggacaaaatgccagcacttccggctaaaggtaacttgaacctccgtgacatcttagagtcggacttcgcgttcgcg

SEQ ID NO: 58 - protein, 890 aa, synthetic construct
  REGION 1..890: note = Variant of RNA polymerase
MHHHHHHMNTINIAKNDFSDIELAAIPFNTLADHYGERLAREQLALEHESYEMGEARFRKMFERQLKAGEVADNAAAKPLITTLLPKMIARINDWFEEVKAKRGKRPTAFQFLQEIKPEAVAYITIKTTLACLTSADRTTVQAVASAIGRAIEDEARFGRIRDLEAKHFQKNVEEQLNKRVGHVYKKAFMQVVEADMLSKGLLGGEAWSSWHKEDSIHVGVRCIEMLIESTGMVSLHRQNAGVVGQDSETIELAPEYAEAIATRAGALAGISPMFQPCVVPPKPWTGITGGGYWANGRRPLALVRTHSKKGLMRYEDVYMPEVYKAINIAQNTAWSINKWVLAVANVITKWKHCPVRDIPAIEREELPMKPEDIDMNPEALTAWKRAKAAVYRRDKARKSRRILLEFMLEQANKFANHKAIWFPYNMDWRGRVYAVSMFNPQGNDMTKGLLTLAKGKPIGKEGYYWLKIHGANCAGVDKVPFPERIKFIEENHENIMACAKSPLENTWWAEQDLPFCFLAFCFEYAGVQHHGLSYNCSLPLAFDGSCSGIQHFSAMLRDEVGGRAVNLLPSETVQDIYGIVAKKVNEILQADAINGTDNEVVTVTDENTGEISEKVKLGTKALAGQWLAYGVTRSVTKRSVMTLAYGSKEFGFRQQVLEDTIQWAIDSGKGLMFTQPNQAAGYMAKLIWESVSVTVVAAVEAMNWLKSAAKLLAAEVKDKKTGEILRKRCAVHWVTPDGFPVWQEYKKPIQTRLNLMFLGQFRLQPTINTNKDSEIDAHKQESGIAPNFVHSQDGSHLRKTVVWAHEKYGIESFALIHDSFGTIPADAANLFKAVRETMVDTYESCDVLADFYDQFADQLHESQLDKMPALPAKGNLNLRDILESDFAFA

SEQ ID NO: 59 - DNA, 2670 bp, synthetic construct
  misc_feature 1..2670: note = Variant of RNA polymerase
  source 1..2670: mol_type = other DNA
atgcaccatcaccatcaccatatgaacacgattaacatcgctaagaacgacttctctgacatcgaactggctgctatcccgttcaacactctggctgaccattacggtgagcgtttagctcgcgaacagttggcccttgagcatgagtcttacgagatgggtgaagcacgcttccgcaagatgtttgagcgtcaacttaaagctggtgaggttgcggataacgctgccgccaagcctctcatcactaccctactccctaagatgattgcacgcatcaacgactggtttgaggaagtgaaagctaagcgcggcaagcgcccgacagccttccagttcctgcaagaaatcaagccggaagccgtagcgtacatcaccattaagaccactctggcttgcctaaccagtgcggaccgtacaaccgttcaggctgtagcaagcgcaatcggtcgggccattgaggacgaggctcgcttcggtcgtatccgtgaccttgaagctaagcacttcaagaaaaactatgaggaacaactcaacaagcgcgtagggcacgtctacaagaaagcatttatgcaagttgtcgaggctgacatgctctctaagggtctactcggtggcgaggcgtggtcttcgtggcataaggaagactctattcatgtaggagtacgctgcatcgagatgctcattgagtcaaccggaatggttagcttacaccgccaaaatgctggcgtagtaggtcaagactctgagactatcgaactcgcacctgaatacgctgaggctatcgcaacccgtgcaggtgcgctggctggcatctctccgatgttccaaccttgcgtagttcctcctaagccgtggactggcattactggtggtggctattgggctaacggtcgtcgtcctctggcgctggtgcgtactcacagtaagaaaggtctgatgcgctacgaagacgtttacatgcctgaggtgtacaaagcgattaacattgcgcaaaacaccgcctggtcgatcaacaagtgggtcctggcggtcgccaacgtaatcaccaagtggaagcattgtccggtccgggacatccctgcgattgagcgtgaagaactcccgatgaaaccggaagacatcgacatgaatcctgaggctctcaccgcgtggaaacgtgctaaagctgctgtgtaccgcagagacaaggctcgcaagtctcgccgtatcttgcttgagttcatgcttgagcaagccaataagtttgctaaccataaggccatctggttcccttacaacatggactggcgcggtcgtgtttacgctgtgtcaatgttcaacccgcaaggtaacgatatgaccaaaggactgcttacgctggcgaaaggtaaaccaatcggtaaggaaggttactactggctgaaaatccacggtgcaaactgtgcgggtgtcgataaggttccgttccctgagcgcatcaagttcattgaggaaaaccacgagaacatcatggcttgcgctaagtctccactggagaacacttggtgggctgagcaagatctcccgttctgcttccttgcgttctgctttgagtacgctggggtacagcaccacggcctgagctataactgctcccttccgctggcgtttgacgggtcttgctctggcatccagcacttctccgcgatgctccgagatgaggtaggtggtcgcgcggttaacttgcttcctagtgaaaccgttcaggacatctacgggattgttgctaagaaagtcaacgagattctacaagcagacgcaatcaatgggaccgataacgaagtagttaccgtgaccgatgagaacactggtgaaatctctgagaaagtcaagctgggcactaaggcactggctggtcaatggctggcttacggtgttactcgcagtgtgactaagcgttcagtcatgacgctggcttacgggtccaaagagttcggcttccgtcaacaagtgctggaagatactattcagtgggctattgattccggcaagggtctgatgttcactcagccgaatcaggctgctggatacatggctaagctgatttgggaatctgtgagcgtgacggtggtagctgcggttgaagcaatgaactggcttaagtctgctgctaagctgctggctgctgaggtcaaagataagaagactggagagattcttcgcaagcgttgcgctgtgcattgggtaactcctgatggtttccctgtgtggcaggaatacaagaagcctattcagacgcgcttgaacctgatgttcctcggtcagttccgcttacagcctaccattaacaccaacaaagatagcgagattgatgcacacaaacaggagtctggtatcgctcctaactttgtacacagccaagacggtagccaccttcgtaagactgtagtgtgggcacacgagaagtacggaatcgaatcttttgcactgattcacgactccttcggtaccattccggctgacgctgcgaacctgttcaaagcagtgcgcgaaactatggttgacacatatgagtcttgtgatgtactggctgatttctacgaccagttcgctgaccagttgcacgagtctcaattggacaaaatgccagcacttccggctaaaggtaacttgaacctccgtgacatcttagagtcggacttcgcgttcgcg

SEQ ID NO: 60 - protein, 890 aa, synthetic construct
  REGION 1..890: note = Variant of RNA polymerase
MHHHHHHMNTINIAKNDFSDIELAAIPFNTLADHYGERLAREQLALEHESYEMGEARFRKMFERQLKAGEVADNAAAKPLITTLLPKMIARINDWFEEVKAKRGKRPTAFQFLQEIKPEAVAYITIKTTLACLTSADRTTVQAVASAIGRAIEDEARFGRIRDLEAKHFKKNYEEQLNKRVGHVYKKAFMQVVEADMLSKGLLGGEAWSSWHKEDSIHVGVRCIEMLIESTGMVSLHRQNAGVVGQDSETIELAPEYAEAIATRAGALAGISPMFQPCVVPPKPWTGITGGGYWANGRRPLALVRTHSKKGLMRYEDVYMPEVYKAINIAQNTAWSINKWVLAVANVITKWKHCPVRDIPAIEREELPMKPEDIDMNPEALTAWKRAKAAVYRRDKARKSRRILLEFMLEQANKFANHKAIWFPYNMDWRGRVYAVSMFNPQGNDMTKGLLTLAKGKPIGKEGYYWLKIHGANCAGVDKVPFPERIKFIEENHENIMACAKSPLENTWWAEQDLPFCFLAFCFEYAGVQHHGLSYNCSLPLAFDGSCSGIQHFSAMLRDEVGGRAVNLLPSETVQDIYGIVAKKVNEILQADAINGTDNEVVTVTDENTGEISEKVKLGTKALAGQWLAYGVTRSVTKRSVMTLAYGSKEFGFRQQVLEDTIQWAIDSGKGLMFTQPNQAAGYMAKLIWESVSVTVVAAVEAMNWLKSAAKLLAAEVKDKKTGEILRKRCAVHWVTPDGFPVWQEYKKPIQTRLNLMFLGQFRLQPTINTNKDSEIDAHKQESGIAPNFVHSQDGSHLRKTVVWAHEKYGIESFALIHDSFGTIPADAANLFKAVRETMVDTYESCDVLADFYDQFADQLHESQLDKMPALPAKGNLNLRDILESDFAFA

SEQ ID NO: 61 - DNA, 2670 bp, synthetic construct
  misc_feature 1..2670: note = Variant of RNA polymerase
  source 1..2670: mol_type = other DNA
atgcaccatcaccatcaccatatgaacacgattaacatcgctaagaacgacttctctgacatcgaactggctgctatcccgttcaacactctggctgaccattacggtgagcgtttagctcgcgaacagttggcccttgagcatgagtcttacgagatgggtgaagcacgcttccgcaagatgtttgagcgtcaacttaaagctggtgaggttgcggataacgctgccgccaagcctctcatcactaccctactccctaagatgattgcacgcatcaacgactggtttgaggaagtgaaagctaagcgcggcaagcgcccgacagccttccagttcctgcaagaaatcaagccggaagccgtagcgtacatcaccattaagaccactctggcttgcctaaccagtgcggaccgtacaaccgttcaggctgtagcaagcgcaatcggtcgggccattgaggacgaggctcgcttcggtcgtatccgtgaccttgaagctaagcacttcaagaaagtggttgaggaacaactcaacaagcgcgtagggcacgtctacaagaaagcatttatgcaagttgtcgaggctgacatgctctctaagggtctactcggtggcgaggcgtggtcttcgtggcataaggaagactctattcatgtaggagtacgctgcatcgagatgctcattgagtcaaccggaatggttagcttacaccgccaaaatgctggcgtagtaggtcaagactctgagactatcgaactcgcacctgaatacgctgaggctatcgcaacccgtgcaggtgcgctggctggcatctctccgatgttccaaccttgcgtagttcctcctaagccgtggactggcattactggtggtggctattgggctaacggtcgtcgtcctctggcgctggtgcgtactcacagtaagaaaggtctgatgcgctacgaagacgtttacatgcctgaggtgtacaaagcgattaacattgcgcaaaacaccgcctggtcgatcaacaagtgggtcctggcggtcgccaacgtaatcaccaagtggaagcattgtccggtccgggacatccctgcgattgagcgtgaagaactcccgatgaaaccggaagacatcgacatgaatcctgaggctctcaccgcgtggaaacgtgctaaagctgctgtgtaccgcagagacaaggctcgcaagtctcgccgtatcttgcttgagttcatgcttgagcaagccaataagtttgctaaccataaggccatctggttcccttacaacatggactggcgcggtcgtgtttacgctgtgtcaatgttcaacccgcaaggtaacgatatgaccaaaggactgcttacgctggcgaaaggtaaaccaatcggtaaggaaggttactactggctgaaaatccacggtgcaaactgtgcgggtgtcgataaggttccgttccctgagcgcatcaagttcattgaggaaaaccacgagaacatcatggcttgcgctaagtctccactggagaacacttggtgggctgagcaagatctcccgttctgcttccttgcgttctgctttgagtacgctggggtacagcaccacggcctgagctataactgctcccttccgctggcgtttgacgggtcttgctctggcatccagcacttctccgcgatgctccgagatgaggtaggtggtcgcgcggttaacttgcttcctagtgaaaccgttcaggacatctacgggattgttgctaagaaagtcaacgagattctacaagcagacgcaatcaatgggaccgataacgaagtagttaccgtgaccgatgagaacactggtgaaatctctgagaaagtcaagctgggcactaaggcactggctggtcaatggctggcttacggtgttactcgcagtgtgactaagcgttcagtcatgacgctggcttacgggtccaaagagttcggcttccgtcaacaagtgctggaagatactattcagtgggctattgattccggcaagggtctgatgttcactcagccgaatcaggctgctggatacatggctaagctgatttgggaatctgtgagcgtgacggtggtagctgcggttgaagcaatgaactggcttaagtctgctgctaagctgctggctgctgaggtcaaagataagaagactggagagattcttcgcaagcgttgcgctgtgcattgggtaactcctgatggtttccctgtgtggcaggaatacaagaagcctattcagacgcgcttgaacctgatgttcctcggtcagttccgcttacagcctaccattaacaccaacaaagatagcgagattgatgcacacaaacaggagtctggtatcgctcctaactttgtacacagccaagacggtagccaccttcgtaagactgtagtgtgggcacacgagaagtacggaatcgaatcttttgcactgattcacgactccttcggtaccattccggctgacgctgcgaacctgttcaaagcagtgcgcgaaactatggttgacacatatgagtcttgtgatgtactggctgatttctacgaccagttcgctgaccagttgcacgagtctcaattggacaaaatgccagcacttccggctaaaggtaacttgaacctccgtgacatcttagagtcggacttcgcgttcgcg

SEQ ID NO: 62 - protein, 890 aa, synthetic construct
  REGION 1..890: note = Variant of RNA polymerase
MHHHHHHMNTINIAKNDFSDIELAAIPFNTLADHYGERLAREQLALEHESYEMGEARFRKMFERQLKAGEVADNAAAKPLITTLLPKMIARINDWFEEVKAKRGKRPTAFQFLQEIKPEAVAYITIKTTLACLTSADRTTVQAVASAIGRAIEDEARFGRIRDLEAKHFKKVVEEQLNKRVGHVYKKAFMQVVEADMLSKGLLGGEAWSSWHKEDSIHVGVRCIEMLIESTGMVSLHRQNAGVVGQDSETIELAPEYAEAIATRAGALAGISPMFQPCVVPPKPWTGITGGGYWANGRRPLALVRTHSKKGLMRYEDVYMPEVYKAINIAQNTAWSINKWVLAVANVITKWKHCPVRDIPAIEREELPMKPEDIDMNPEALTAWKRAKAAVYRRDKARKSRRILLEFMLEQANKFANHKAIWFPYNMDWRGRVYAVSMFNPQGNDMTKGLLTLAKGKPIGKEGYYWLKIHGANCAGVDKVPFPERIKFIEENHENIMACAKSPLENTWWAEQDLPFCFLAFCFEYAGVQHHGLSYNCSLPLAFDGSCSGIQHFSAMLRDEVGGRAVNLLPSETVQDIYGIVAKKVNEILQADAINGTDNEVVTVTDENTGEISEKVKLGTKALAGQWLAYGVTRSVTKRSVMTLAYGSKEFGFRQQVLEDTIQWAIDSGKGLMFTQPNQAAGYMAKLIWESVSVTVVAAVEAMNWLKSAAKLLAAEVKDKKTGEILRKRCAVHWVTPDGFPVWQEYKKPIQTRLNLMFLGQFRLQPTINTNKDSEIDAHKQESGIAPNFVHSQDGSHLRKTVVWAHEKYGIESFALIHDSFGTIPADAANLFKAVRETMVDTYESCDVLADFYDQFADQLHESQLDKMPALPAKGNLNLRDILESDFAFA

SEQ ID NO: 63 - DNA, 2670 bp, synthetic construct
  misc_feature 1..2670: note = Variant of RNA polymerase
  source 1..2670: mol_type = other DNA
atgcaccatcaccatcaccatatgaacacgattaacatcgctaagaacgacttctctgacatcgaactggctgctatcccgttcaacactctggctgaccattacggtgagcgtttagctcgcgaacagttggcccttgagcatgagtcttacgagatgggtgaagcacgcttccgcaagatgtttgagcgtcaacttaaagctggtgaggttgcggataacgctgccgccaagcctctcatcactaccctactccctaagatgattgcacgcatcaacgactggtttgaggaagtgaaagctaagcgcggcaagcgcccgacagccttccagttcctgcaagaaatcaagccggaagccgtagcgtacatcaccattaagaccactctggcttgcctaaccagtgcggaccgtacaaccgttcaggctgtagcaagcgcaatcggtcgggccattgaggacgaggctcgcttcggtcgtatccgtgaccttgaagctaagcacttcaagaaaaacttggaggaacaactcaacaagcgcgtagggcacgtctacaagaaagcatttatgcaagttgtcgaggctgacatgctctctaagggtctactcggtggcgaggcgtggtcttcgtggcataaggaagactctattcatgtaggagtacgctgcatcgagatgctcattgagtcaaccggaatggttagcttacaccgccaaaatgctggcgtagtaggtcaagactctgagactatcgaactcgcacctgaatacgctgaggctatcgcaacccgtgcaggtgcgctggctggcatctctccgatgttccaaccttgcgtagttcctcctaagccgtggactggcattactggtggtggctattgggctaacggtcgtcgtcctctggcgctggtgcgtactcacagtaagaaaggtctgatgcgctacgaagacgtttacatgcctgaggtgtacaaagcgattaacattgcgcaaaacaccgcctggtcgatcaacaagtgggtcctggcggtcgccaacgtaatcaccaagtggaagcattgtccggtccgggacatccctgcgattgagcgtgaagaactcccgatgaaaccggaagacatcgacatgaatcctgaggctctcaccgcgtggaaacgtgctaaagctgctgtgtaccgcagagacaaggctcgcaagtctcgccgtatcttgcttgagttcatgcttgagcaagccaataagtttgctaaccataaggccatctggttcccttacaacatggactggcgcggtcgtgtttacgctgtgtcaatgttcaacccgcaaggtaacgatatgaccaaaggactgcttacgctggcgaaaggtaaaccaatcggtaaggaaggttactactggctgaaaatccacggtgcaaactgtgcgggtgtcgataaggttccgttccctgagcgcatcaagttcattgaggaaaaccacgagaacatcatggcttgcgctaagtctccactggagaacacttggtgggctgagcaagatctcccgttctgcttccttgcgttctgctttgagtacgctggggtacagcaccacggcctgagctataactgctcccttccgctggcgtttgacgggtcttgctctggcatccagcacttctccgcgatgctccgagatgaggtaggtggtcgcgcggttaacttgcttcctagtgaaaccgttcaggacatctacgggattgttgctaagaaagtcaacgagattctacaagcagacgcaatcaatgggaccgataacgaagtagttaccgtgaccgatgagaacactggtgaaatctctgagaaagtcaagctgggcactaaggcactggctggtcaatggctggcttacggtgttactcgcagtgtgactaagcgttcagtcatgacgctggcttacgggtccaaagagttcggcttccgtcaacaagtgctggaagatactattcagtgggctattgattccggcaagggtctgatgttcactcagccgaatcaggctgctggatacatggctaagctgatttgggaatctgtgagcgtgacggtggtagctgcggttgaagcaatgaactggcttaagtctgctgctaagctgctggctgctgaggtcaaagataagaagactggagagattcttcgcaagcgttgcgctgtgcattgggtaactcctgatggtttccctgtgtggcaggaatacaagaagcctattcagacgcgcttgaacctgatgttcctcggtcagttccgcttacagcctaccattaacaccaacaaagatagcgagattgatgcacacaaacaggagtctggtatcgctcctaactttgtacacagccaagacggtagccaccttcgtaagactgtagtgtgggcacacgagaagtacggaatcgaatcttttgcactgattcacgactccttcggtaccattccggctgacgctgcgaacctgttcaaagcagtgcgcgaaactatggttgacacatatgagtcttgtgatgtactggctgatttctacgaccagttcgctgaccagttgcacgagtctcaattggacaaaatgccagcacttccggctaaaggtaacttgaacctccgtgacatcttagagtcggacttcgcgttcgcg

SEQ ID NO: 64 - protein, 890 aa, synthetic construct
  REGION 1..890: note = Variant of RNA polymerase
MHHHHHHMNTINIAKNDFSDIELAAIPFNTLADHYGERLAREQLALEHESYEMGEARFRKMFERQLKAGEVADNAAAKPLITTLLPKMIARINDWFEEVKAKRGKRPTAFQFLQEIKPEAVAYITIKTTLACLTSADRTTVQAVASAIGRAIEDEARFGRIRDLEAKHFKKNLEEQLNKRVGHVYKKAFMQVVEADMLSKGLLGGEAWSSWHKEDSIHVGVRCIEMLIESTGMVSLHRQNAGVVGQDSETIELAPEYAEAIATRAGALAGISPMFQPCVVPPKPWTGITGGGYWANGRRPLALVRTHSKKGLMRYEDVYMPEVYKAINIAQNTAWSINKWVLAVANVITKWKHCPVRDIPAIEREELPMKPEDIDMNPEALTAWKRAKAAVYRRDKARKSRRILLEFMLEQANKFANHKAIWFPYNMDWRGRVYAVSMFNPQGNDMTKGLLTLAKGKPIGKEGYYWLKIHGANCAGVDKVPFPERIKFIEENHENIMACAKSPLENTWWAEQDLPFCFLAFCFEYAGVQHHGLSYNCSLPLAFDGSCSGIQHFSAMLRDEVGGRAVNLLPSETVQDIYGIVAKKVNEILQADAINGTDNEVVTVTDENTGEISEKVKLGTKALAGQWLAYGVTRSVTKRSVMTLAYGSKEFGFRQQVLEDTIQWAIDSGKGLMFTQPNQAAGYMAKLIWESVSVTVVAAVEAMNWLKSAAKLLAAEVKDKKTGEILRKRCAVHWVTPDGFPVWQEYKKPIQTRLNLMFLGQFRLQPTINTNKDSEIDAHKQESGIAPNFVHSQDGSHLRKTVVWAHEKYGIESFALIHDSFGTIPADAANLFKAVRETMVDTYESCDVLADFYDQFADQLHESQLDKMPALPAKGNLNLRDILESDFAFA

SEQ ID NO: 65 - DNA, 2670 bp, synthetic construct
  misc_feature 1..2670: note = Variant of RNA polymerase
  source 1..2670: mol_type = other DNA
atgcaccatcaccatcaccatatgaacacgattaacatcgctaagaacgacttctctgacatcgaactggctgctatcccgttcaacactctggctgaccattacggtgagcgtttagctcgcgaacagttggcccttgagcatgagtcttacgagatgggtgaagcacgcttccgcaagatgtttgagcgtcaacttaaagctggtgaggttgcggataacgctgccgccaagcctctcatcactaccctactccctaagatgattgcacgcatcaacgactggtttgaggaagtgaaagctaagcgcggcaagcgcccgacagccttccagttcctgcaagaaatcaagccggaagccgtagcgtacatcaccattaagaccactctggcttgcctaaccagtgcggaccgtacaaccgttcaggctgtagcaagcgcaatcggtcgggccattgaggacgaggctcgcttcggtcgtatccgtgaccttgaagctaagcacttcaagaaagaggttgaggaacaactcaacaagcgcgtagggcacgtctacaagaaagcatttatgcaagttgtcgaggctgacatgctctctaagggtctactcggtggcgaggcgtggtcttcgtggcataaggaagactctattcatgtaggagtacgctgcatcgagatgctcattgagtcaaccggaatggttagcttacaccgccaaaatgctggcgtagtaggtcaagactctgagactatcgaactcgcacctgaatacgctgaggctatcgcaacccgtgcaggtgcgctggctggcatctctccgatgttccaaccttgcgtagttcctcctaagccgtggactggcattactggtggtggctattgggctaacggtcgtcgtcctctggcgctggtgcgtactcacagtaagaaaggtctgatgcgctacgaagacgtttacatgcctgaggtgtacaaagcgattaacattgcgcaaaacaccgcctggtcgatcaacaagtgggtcctggcggtcgccaacgtaatcaccaagtggaagcattgtccggtccgggacatccctgcgattgagcgtgaagaactcccgatgaaaccggaagacatcgacatgaatcctgaggctctcaccgcgtggaaacgtgctaaagctgctgtgtaccgcagagacaaggctcgcaagtctcgccgtatcttgcttgagttcatgcttgagcaagccaataagtttgctaaccataaggccatctggttcccttacaacatggactggcgcggtcgtgtttacgctgtgtcaatgttcaacccgcaaggtaacgatatgaccaaaggactgcttacgctggcgaaaggtaaaccaatcggtaaggaaggttactactggctgaaaatccacggtgcaaactgtgcgggtgtcgataaggttccgttccctgagcgcatcaagttcattgaggaaaaccacgagaacatcatggcttgcgctaagtctccactggagaacacttggtgggctgagcaagatctcccgttctgcttccttgcgttctgctttgagtacgctggggtacagcaccacggcctgagctataactgctcccttccgctggcgtttgacgggtcttgctctggcatccagcacttctccgcgatgctccgagatgaggtaggtggtcgcgcggttaacttgcttcctagtgaaaccgttcaggacatctacgggattgttgctaagaaagtcaacgagattctacaagcagacgcaatcaatgggaccgataacgaagtagttaccgtgaccgatgagaacactggtgaaatctctgagaaagtcaagctgggcactaaggcactggctggtcaatggctggcttacggtgttactcgcagtgtgactaagcgttcagtcatgacgctggcttacgggtccaaagagttcggcttccgtcaacaagtgctggaagatactattcagtgggctattgattccggcaagggtctgatgttcactcagccgaatcaggctgctggatacatggctaagctgatttgggaatctgtgagcgtgacggtggtagctgcggttgaagcaatgaactggcttaagtctgctgctaagctgctggctgctgaggtcaaagataagaagactggagagattcttcgcaagcgttgcgctgtgcattgggtaactcctgatggtttccctgtgtggcaggaatacaagaagcctattcagacgcgcttgaacctgatgttcctcggtcagttccgcttacagcctaccattaacaccaacaaagatagcgagattgatgcacacaaacaggagtctggtatcgctcctaactttgtacacagccaagacggtagccaccttcgtaagactgtagtgtgggcacacgagaagtacggaatcgaatcttttgcactgattcacgactccttcggtaccattccggctgacgctgcgaacctgttcaaagcagtgcgcgaaactatggttgacacatatgagtcttgtgatgtactggctgatttctacgaccagttcgctgaccagttgcacgagtctcaattggacaaaatgccagcacttccggctaaaggtaacttgaacctccgtgacatcttagagtcggacttcgcgttcgcg

SEQ ID NO: 66 - protein, 890 aa, synthetic construct
  REGION 1..890: note = Variant of RNA polymerase
MHHHHHHMNTINIAKNDFSDIELAAIPFNTLADHYGERLAREQLALEHESYEMGEARFRKMFERQLKAGEVADNAAAKPLITTLLPKMIARINDWFEEVKAKRGKRPTAFQFLQEIKPEAVAYITIKTTLACLTSADRTTVQAVASAIGRAIEDEARFGRIRDLEAKHFKKEVEEQLNKRVGHVYKKAFMQVVEADMLSKGLLGGEAWSSWHKEDSIHVGVRCIEMLIESTGMVSLHRQNAGVVGQDSETIELAPEYAEAIATRAGALAGISPMFQPCVVPPKPWTGITGGGYWANGRRPLALVRTHSKKGLMRYEDVYMPEVYKAINIAQNTAWSINKWVLAVANVITKWKHCPVRDIPAIEREELPMKPEDIDMNPEALTAWKRAKAAVYRRDKARKSRRILLEFMLEQANKFANHKAIWFPYNMDWRGRVYAVSMFNPQGNDMTKGLLTLAKGKPIGKEGYYWLKIHGANCAGVDKVPFPERIKFIEENHENIMACAKSPLENTWWAEQDLPFCFLAFCFEYAGVQHHGLSYNCSLPLAFDGSCSGIQHFSAMLRDEVGGRAVNLLPSETVQDIYGIVAKKVNEILQADAINGTDNEVVTVTDENTGEISEKVKLGTKALAGQWLAYGVTRSVTKRSVMTLAYGSKEFGFRQQVLEDTIQWAIDSGKGLMFTQPNQAAGYMAKLIWESVSVTVVAAVEAMNWLKSAAKLLAAEVKDKKTGEILRKRCAVHWVTPDGFPVWQEYKKPIQTRLNLMFLGQFRLQPTINTNKDSEIDAHKQESGIAPNFVHSQDGSHLRKTVVWAHEKYGIESFALIHDSFGTIPADAANLFKAVRETMVDTYESCDVLADFYDQFADQLHESQLDKMPALPAKGNLNLRDILESDFAFA

SEQ ID NO: 67 - DNA, 2670 bp, synthetic construct
  misc_feature 1..2670: note = Variant of RNA polymerase
  source 1..2670: mol_type = other DNA
atgcaccatcaccatcaccatatgaacacgattaacatcgctaagaacgacttctctgacatcgaactggctgctatcccgttcaacactctggctgaccattacggtgagcgtttagctcgcgaacagttggcccttgagcatgagtcttacgagatgggtgaagcacgcttccgcaagatgtttgagcgtcaacttaaagctggtgaggttgcggataacgctgccgccaagcctctcatcactaccctactccctaagatgattgcacgcatcaacgactggtttgaggaagtgaaagctaagcgcggcaagcgcccgacagccttccagttcctgcaagaaatcaagccggaagccgtagcgtacatcaccattaagaccactctggcttgcctaaccagtgcggaccgtacaaccgttcaggctgtagcaagcgcaatcggtcgggccattgaggacgaggctcgcttcggtcgtatccgtgaccttgaagctaagcacttcagtaaaaacgttgaggaacaactcaacaagcgcgtagggcacgtctacaagaaagcatttatgcaagttgtcgaggctgacatgctctctaagggtctactcggtggcgaggcgtggtcttcgtggcataaggaagactctattcatgtaggagtacgctgcatcgagatgctcattgagtcaaccggaatggttagcttacaccgccaaaatgctggcgtagtaggtcaagactctgagactatcgaactcgcacctgaatacgctgaggctatcgcaacccgtgcaggtgcgctggctggcatctctccgatgttccaaccttgcgtagttcctcctaagccgtggactggcattactggtggtggctattgggctaacggtcgtcgtcctctggcgctggtgcgtactcacagtaagaaaggtctgatgcgctacgaagacgtttacatgcctgaggtgtacaaagcgattaacattgcgcaaaacaccgcctggtcgatcaacaagtgggtcctggcggtcgccaacgtaatcaccaagtggaagcattgtccggtccgggacatccctgcgattgagcgtgaagaactcccgatgaaaccggaagacatcgacatgaatcctgaggctctcaccgcgtggaaacgtgctaaagctgctgtgtaccgcagagacaaggctcgcaagtctcgccgtatcttgcttgagttcatgcttgagcaagccaataagtttgctaaccataaggccatctggttcccttacaacatggactggcgcggtcgtgtttacgctgtgtcaatgttcaacccgcaaggtaacgatatgaccaaaggactgcttacgctggcgaaaggtaaaccaatcggtaaggaaggttactactggctgaaaatccacggtgcaaactgtgcgggtgtcgataaggttccgttccctgagcgcatcaagttcattgaggaaaaccacgagaacatcatggcttgcgctaagtctccactggagaacacttggtgggctgagcaagatctcccgttctgcttccttgcgttctgctttgagtacgctggggtacagcaccacggcctgagctataactgctcccttccgctggcgtttgacgggtcttgctctggcatccagcacttctccgcgatgctccgagatgaggtaggtggtcgcgcggttaacttgcttcctagtgaaaccgttcaggacatctacgggattgttgctaagaaagtcaacgagattctacaagcagacgcaatcaatgggaccgataacgaagtagttaccgtgaccgatgagaacactggtgaaatctctgagaaagtcaagctgggcactaaggcactggctggtcaatggctggattacggtgttactcgcagtgtgactaagcgttcagtcatgacgctggcttacgggtccaaagagttcggcttccgtcaacaagtgctggaagatactattcagtgggctattgattccggcaagggtctgatgttcactcagccgaatcaggctgctggatacatggctaagctgatttgggaatctgtgagcgtgacggtggtagctgcggttgaagcaatgaactggcttaagtctgctgctaagctgctggctgctgaggtcaaagataagaagactggagagattcttcgcaagcgttgcgctgtgcattgggtaactcctgatggtttccctgtgtggcaggaatacaagaagcctattcagacgcgcttgaacctgatgttcctcggtcagttccgcttacagcctaccattaacaccaacaaagatagcgagattgatgcacacaaacaggagtctggtatcgctcctaactttgtacacagccaagacggtagccaccttcgtaagactgtagtgtgggcacacgagaagtacggaatcgaatcttttgcactgattcacgactccttcggtaccattccggctgacgctgcgaacctgttcaaagcagtgcgcgaaactatggttgacacatatgagtcttgtgatgtactggctgatttctacgaccagttcgctgaccagttgcacgagtctcaattggacaaaatgccagcacttccggctaaaggtaacttgaacctccgtgacatcttagagtcggacttcgcgttcgcg

SEQ ID NO: 68 - protein, 890 aa, synthetic construct
  REGION 1..890: note = Variant of RNA polymerase
MHHHHHHMNTINIAKNDFSDIELAAIPFNTLADHYGERLAREQLALEHESYEMGEARFRKMFERQLKAGEVADNAAAKPLITTLLPKMIARINDWFEEVKAKRGKRPTAFQFLQEIKPEAVAYITIKTTLACLTSADRTTVQAVASAIGRAIEDEARFGRIRDLEAKHFSKNVEEQLNKRVGHVYKKAFMQVVEADMLSKGLLGGEAWSSWHKEDSIHVGVRCIEMLIESTGMVSLHRQNAGVVGQDSETIELAPEYAEAIATRAGALAGISPMFQPCVVPPKPWTGITGGGYWANGRRPLALVRTHSKKGLMRYEDVYMPEVYKAINIAQNTAWSINKWVLAVANVITKWKHCPVRDIPAIEREELPMKPEDIDMNPEALTAWKRAKAAVYRRDKARKSRRILLEFMLEQANKFANHKAIWFPYNMDWRGRVYAVSMFNPQGNDMTKGLLTLAKGKPIGKEGYYWLKIHGANCAGVDKVPFPERIKFIEENHENIMACAKSPLENTWWAEQDLPFCFLAFCFEYAGVQHHGLSYNCSLPLAFDGSCSGIQHFSAMLRDEVGGRAVNLLPSETVQDIYGIVAKKVNEILQADAINGTDNEVVTVTDENTGEISEKVKLGTKALAGQWLDYGVTRSVTKRSVMTLAYGSKEFGFRQQVLEDTIQWAIDSGKGLMFTQPNQAAGYMAKLIWESVSVTVVAAVEAMNWLKSAAKLLAAEVKDKKTGEILRKRCAVHWVTPDGFPVWQEYKKPIQTRLNLMFLGQFRLQPTINTNKDSEIDAHKQESGIAPNFVHSQDGSHLRKTVVWAHEKYGIESFALIHDSFGTIPADAANLFKAVRETMVDTYESCDVLADFYDQFADQLHESQLDKMPALPAKGNLNLRDILESDFAFA

SEQ ID NO: 69 - DNA, 2670 bp, synthetic construct
  misc_feature 1..2670: note = Variant of RNA polymerase
  source 1..2670: mol_type = other DNA
atgcaccatcaccatcaccatatgaacacgattaacatcgctaagaacgacttctctgacatcgaactggctgctatcccgttcaacactctggctgaccattacggtgagcgtttagctcgcgaacagttggcccttgagcatgagtcttacgagatgggtgaagcacgcttccgcaagatgtttgagcgtcaacttaaagctggtgaggttgcggataacgctgccgccaagcctctcatcactaccctactccctaagatgattgcacgcatcaacgactggtttgaggaagtgaaagctaagcgcggcaagcgcccgacagccttccagttcctgcaagaaatcaagccggaagccgtagcgtacatcaccattaagaccactctggcttgcctaaccagtgcggaccgtacaaccgttcaggctgtagcaagcgcaatcggtcgggccattgaggacgaggctcgcttcggtcgtatccgtgaccttgaagctaagcacttcaagtttaacgttgaggaacaactcaacaagcgcgtagggcacgtctacaagaaagcatttatgcaagttgtcgaggctgacatgctctctaagggtctactcggtggcgaggcgtggtcttcgtggcataaggaagactctattcatgtaggagtacgctgcatcgagatgctcattgagtcaaccggaatggttagcttacaccgccaaaatgctggcgtagtaggtcaagactctgagactatcgaactcgcacctgaatacgctgaggctatcgcaacccgtgcaggtgcgctggctggcatctctccgatgttccaaccttgcgtagttcctcctaagccgtggactggcattactggtggtggctattgggctaacggtcgtcgtcctctggcgctggtgcgtactcacagtaagaaaggtctgatgcgctacgaagacgtttacatgcctgaggtgtacaaagcgattaacattgcgcaaaacaccgcctggtcgatcaacaagtgggtcctggcggtcgccaacgtaatcaccaagtggaagcattgtccggtccgggacatccctgcgattgagcgtgaagaactcccgatgaaaccggaagacatcgacatgaatcctgaggctctcaccgcgtggaaacgtgctaaagctgctgtgtaccgcagagacaaggctcgcaagtctcgccgtatcttgcttgagttcatgcttgagcaagccaataagtttgctaaccataaggccatctggttcccttacaacatggactggcgcggtcgtgtttacgctgtgtcaatgttcaacccgcaaggtaacgatatgaccaaaggactgcttacgctggcgaaaggtaaaccaatcggtaaggaaggttactactggctgaaaatccacggtgcaaactgtgcgggtgtcgataaggttccgttccctgagcgcatcaagttcattgaggaaaaccacgagaacatcatggcttgcgctaagtctccactggagaacacttggtgggctgagcaagatctcccgttctgcttccttgcgttctgctttgagtacgctggggtacagcaccacggcctgagctataactgctcccttccgctggcgtttgacgggtcttgctctggcatccagcacttctccgcgatgctccgagatgaggtaggtggtcgcgcggttaacttgcttcctagtgaaaccgttcaggacatctacgggattgttgctaagaaagtcaacgagattctacaagcagacgcaatcaatgggaccgataacgaagtagttaccgtgaccgatgagaacactggtgaaatctctgagaaagtcaagctgggcactaaggcactggctggtcaatggctggcttacggtgttactcgcagtgtgactaagcgttcagtcatgacgctggcttacgggtccaaagagttcggcttccgtcaacaagtgctggaagatactattcagtgggctattgattccggcaagggtctgatgttcactcagccgaatcaggctgctggatacatggctaagctgatttgggaatctgtgagcgtgacggtggtagctgcggttgaagcaatgaactggcttaagtctgctgctaagctgctggctgctgaggtcaaagataagaagactggagagattcttcgcaagcgttgcgctgtgcattgggtaactcctgatggtttccctgtgtggcaggaatacaagaagcctattcagacgcgcttgaacctgatgttcctcggtcagttccgcttacagcctaccattaacaccaacaaagatagcgagattgatgcacacaaacaggagtctggtatcgctcctaactttgtacacagccaagacggtagccaccttcgtaagactgtagtgtgggcacacgagaagtacggaatcgaatcttttgcactgattcacgactccttcggtaccattccggctgacgctgcgaacctgttcaaagcagtgcgcgaaactatggttgacacatatgagtcttgtgatgtactggctgatttctacgaccagttcgctgaccagttgcacgagtctcaattggacaaaatgccagcacttccggctaaaggtaacttgaacctccgtgacatcttagagtcggacttcgcgttcgcg

SEQ ID NO: 70 - protein, 890 aa, synthetic construct
  REGION 1..890: note = Variant of RNA polymerase
MHHHHHHMNTINIAKNDFSDIELAAIPFNTLADHYGERLAREQLALEHESYEMGEARFRKMFERQLKAGEVADNAAAKPLITTLLPKMIARINDWFEEVKAKRGKRPTAFQFLQEIKPEAVAYITIKTTLACLTSADRTTVQAVASAIGRAIEDEARFGRIRDLEAKHFKFNVEEQLNKRVGHVYKKAFMQVVEADMLSKGLLGGEAWSSWHKEDSIHVGVRCIEMLIESTGMVSLHRQNAGVVGQDSETIELAPEYAEAIATRAGALAGISPMFQPCVVPPKPWTGITGGGYWANGRRPLALVRTHSKKGLMRYEDVYMPEVYKAINIAQNTAWSINKWVLAVANVITKWKHCPVRDIPAIEREELPMKPEDIDMNPEALTAWKRAKAAVYRRDKARKSRRILLEFMLEQANKFANHKAIWFPYNMDWRGRVYAVSMFNPQGNDMTKGLLTLAKGKPIGKEGYYWLKIHGANCAGVDKVPFPERIKFIEENHENIMACAKSPLENTWWAEQDLPFCFLAFCFEYAGVQHHGLSYNCSLPLAFDGSCSGIQHFSAMLRDEVGGRAVNLLPSETVQDIYGIVAKKVNEILQADAINGTDNEVVTVTDENTGEISEKVKLGTKALAGQWLAYGVTRSVTKRSVMTLAYGSKEFGFRQQVLEDTIQWAIDSGKGLMFTQPNQAAGYMAKLIWESVSVTVVAAVEAMNWLKSAAKLLAAEVKDKKTGEILRKRCAVHWVTPDGFPVWQEYKKPIQTRLNLMFLGQFRLQPTINTNKDSEIDAHKQESGIAPNFVHSQDGSHLRKTVVWAHEKYGIESFALIHDSFGTIPADAANLFKAVRETMVDTYESCDVLADFYDQFADQLHESQLDKMPALPAKGNLNLRDILESDFAFA

SEQ ID NO: 71 - DNA, 2670 bp, synthetic construct
  misc_feature 1..2670: note = Variant of RNA polymerase
  source 1..2670: mol_type = other DNA
atgcaccatcaccatcaccatatgaacacgattaacatcgctaagaacgacttctctgacatcgaactggctgctatcccgttcaacactctggctgaccattacggtgagcgtttagctcgcgaacagttggcccttgagcatgagtcttacgagatgggtgaagcacgcttccgcaagatgtttgagcgtcaacttaaagctggtgaggttgcggataacgctgccgccaagcctctcatcactaccctactccctaagatgattgcacgcatcaacgactggtttgaggaagtgaaagctaagcgcggcaagcgcccgacagccttccagttcctgcaagaaatcaagccggaagccgtagcgtacatcaccattaagaccactctggcttgcctaaccagtgcggaccgtacaaccgttcaggctgtagcaagcgcaatcggtcgggccattgaggacgaggctcgcttcggtcgtatccgtgaccttgaagctaaggtgttcaagaaaaacgttgaggaacaactcaacaagcgcgtagggcacgtctacaagaaagcatttatgcaagttgtcgaggctgacatgctctctaagggtctactcggtggcgaggcgtggtcttcgtggcataaggaagactctattcatgtaggagtacgctgcatcgagatgctcattgagtcaaccggaatggttagcttacaccgccaaaatgctggcgtagtaggtcaagactctgagactatcgaactcgcacctgaatacgctgaggctatcgcaacccgtgcaggtgcgctggctggcatctctccgatgttccaaccttgcgtagttcctcctaagccgtggactggcattactggtggtggctattgggctaacggtcgtcgtcctctggcgctggtgcgtactcacagtaagaaaggtctgatgcgctacgaagacgtttacatgcctgaggtgtacaaagcgattaacattgcgcaaaacaccgcctggtcgatcaacaagtgggtcctggcggtcgccaacgtaatcaccaagtggaagcattgtccggtccgggacatccctgcgattgagcgtgaagaactcccgatgaaaccggaagacatcgacatgaatcctgaggctctcaccgcgtggaaacgtgctaaagctgctgtgtaccgcagagacaaggctcgcaagtctcgccgtatcttgcttgagttcatgcttgagcaagccaataagtttgctaaccataaggccatctggttcccttacaacatggactggcgcggtcgtgtttacgctgtgtcaatgttcaacccgcaaggtaacgatatgaccaaaggactgcttacgctggcgaaaggtaaaccaatcggtaaggaaggttactactggctgaaaatccacggtgcaaactgtgcgggtgtcgataaggttccgttccctgagcgcatcaagttcattgaggaaaaccacgagaacatcatggcttgcgctaagtctccactggagaacacttggtgggctgagcaagatctcccgttctgcttccttgcgttctgctttgagtacgctggggtacagcaccacggcctgagctataactgctcccttccgctggcgtttgacgggtcttgctctggcatccagcacttctccgcgatgctccgagatgaggtaggtggtcgcgcggttaacttgcttcctagtgaaaccgttcaggacatctacgggattgttgctaagaaagtcaacgagattctacaagcagacgcaatcaatgggaccgataacgaagtagttaccgtgaccgatgagaacactggtgaaatctctgagaaagtcaagctgggcactaaggcactggctggtcaatggctggcttacggtgttactcgcagtgtgactaagcgttcagtcatgacgctggcttacgggtccaaagagttcggcttccgtcaacaagtgctggaagatactattcagtgggctattgattccggcaagggtctgatgttcactcagccgaatcaggctgctggatacatggctaagctgatttgggaatctgtgagcgtgacggtggtagctgcggttgaagcaatgaactggcttaagtctgctgctaagctgctggctgctgaggtcaaagataagaagactggagagattcttcgcaagcgttgcgctgtgcattgggtaactcctgatggtttccctgtgtggcaggaatacaagaagcctattcagacgcgcttgaacctgatgttcctcggtcagttccgcttacagcctaccattaacaccaacaaagatagcgagattgatgcacacaaacaggagtctggtatcgctcctaactttgtacacagccaagacggtagccaccttcgtaagactgtagtgtgggcacacgagaagtacggaatcgaatcttttgcactgattcacgactccttcggtaccattccggctgacgctgcgaacctgttcaaagcagtgcgcgaaactatggttgacacatatgagtcttgtgatgtactggctgatttctacgaccagttcgctgaccagttgcacgagtctcaattggacaaaatgccagcacttccggctaaaggtaacttgaacctccgtgacatcttagagtcggacttcgcgttcgcg

SEQ ID NO: 72 - protein, 890 aa, synthetic construct
  REGION 1..890: note = Variant of RNA polymerase
MHHHHHHMNTINIAKNDFSDIELAAIPFNTLADHYGERLAREQLALEHESYEMGEARFRKMFERQLKAGEVADNAAAKPLITTLLPKMIARINDWFEEVKAKRGKRPTAFQFLQEIKPEAVAYITIKTTLACLTSADRTTVQAVASAIGRAIEDEARFGRIRDLEAKVFKKNVEEQLNKRVGHVYKKAFMQVVEADMLSKGLLGGEAWSSWHKEDSIHVGVRCIEMLIESTGMVSLHRQNAGVVGQDSETIELAPEYAEAIATRAGALAGISPMFQPCVVPPKPWTGITGGGYWANGRRPLALVRTHSKKGLMRYEDVYMPEVYKAINIAQNTAWSINKWVLAVANVITKWKHCPVRDIPAIEREELPMKPEDIDMNPEALTAWKRAKAAVYRRDKARKSRRILLEFMLEQANKFANHKAIWFPYNMDWRGRVYAVSMFNPQGNDMTKGLLTLAKGKPIGKEGYYWLKIHGANCAGVDKVPFPERIKFIEENHENIMACAKSPLENTWWAEQDLPFCFLAFCFEYAGVQHHGLSYNCSLPLAFDGSCSGIQHFSAMLRDEVGGRAVNLLPSETVQDIYGIVAKKVNEILQADAINGTDNEVVTVTDENTGEISEKVKLGTKALAGQWLAYGVTRSVTKRSVMTLAYGSKEFGFRQQVLEDTIQWAIDSGKGLMFTQPNQAAGYMAKLIWESVSVTVVAAVEAMNWLKSAAKLLAAEVKDKKTGEILRKRCAVHWVTPDGFPVWQEYKKPIQTRLNLMFLGQFRLQPTINTNKDSEIDAHKQESGIAPNFVHSQDGSHLRKTVVWAHEKYGIESFALIHDSFGTIPADAANLFKAVRETMVDTYESCDVLADFYDQFADQLHESQLDKMPALPAKGNLNLRDILESDFAFA

SEQ ID NO: 73 - DNA, 2670 bp, synthetic construct
  misc_feature 1..2670: note = Variant of RNA polymerase
  source 1..2670: mol_type = other DNA
atgcaccatcaccatcaccatatgaacacgattaacatcgctaagaacgacttctctgacatcgaactggctgctatcccgttcaacactctggctgaccattacggtgagcgtttagctcgcgaacagttggcccttgagcatgagtcttacgagatgggtgaagcacgcttccgcaagatgtttgagcgtcaacttaaagctggtgaggttgcggataacgctgccgccaagcctctcatcactaccctactccctaagatgattgcacgcatcaacgactggtttgaggaagtgaaagctaagcgcggcaagcgcccgacagccttccagttcctgcaagaaatcaagccggaagccgtagcgtacatcaccattaagaccactctggcttgcctaaccagtgcggaccgtacaaccgttcaggctgtagcaagcgcaatcggtcgggccattgaggacgaggctcgcttcggtcgtatccgtgaccttgaagctaagcacttcaagaaaaaggttgaggaacaactcaacaagcgcgtagggcacgtctacaagaaagcatttatgcaagttgtcgaggctgacatgctctctaagggtctactcggtggcgaggcgtggtcttcgtggcataaggaagactctattcatgtaggagtacgctgcatcgagatgctcattgagtcaaccggaatggttagcttacaccgccaaaatgctggcgtagtaggtcaagactctgagactatcgaactcgcacctgaatacgctgaggctatcgcaacccgtgcaggtgcgctggctggcatctctccgatgttccaaccttgcgtagttcctcctaagccgtggactggcattactggtggtggctattgggctaacggtcgtcgtcctctggcgctggtgcgtactcacagtaagaaaggtctgatgcgctacgaagacgtttacatgcctgaggtgtacaaagcgattaacattgcgcaaaacaccgcctggtcgatcaacaagtgggtcctggcggtcgccaacgtaatcaccaagtggaagcattgtccggtccgggacatccctgcgattgagcgtgaagaactcccgatgaaaccggaagacatcgacatgaatcctgaggctctcaccgcgtggaaacgtgctaaagctgctgtgtaccgcagagacaaggctcgcaagtctcgccgtatcttgcttgagttcatgcttgagcaagccaataagtttgctaaccataaggccatctggttcccttacaacatggactggcgcggtcgtgtttacgctgtgtcaatgttcaacccgcaaggtaacgatatgaccaaaggactgcttacgctggcgaaaggtaaaccaatcggtaaggaaggttactactggctgaaaatccacggtgcaaactgtgcgggtgtcgataaggttccgttccctgagcgcatcaagttcattgaggaaaaccacgagaacatcatggcttgcgctaagtctccactggagaacacttggtgggctgagcaagatctcccgttctgcttccttgcgttctgctttgagtacgctggggtacagcaccacggcctgagctataactgctcccttccgctggcgtttgacgggtcttgctctggcatccagcacttctccgcgatgctccgagatgaggtaggtggtcgcgcggttaacttgcttcctagtgaaaccgttcaggacatctacgggattgttgctaagaaagtcaacgagattctacaagcagacgcaatcaatgggaccgataacgaagtagttaccgtgaccgatgagaacactggtgaaatctctgagaaagtcaagctgggcactaaggcactggctggtcaatggctggcttacggtgttactcgcagtgtgactaagcgttcagtcatgacgctggcttacgggtccaaagagttcggcttccgtcaacaagtgctggaagatactattcagtgggctattgattccggcaagggtctgatgttcactcagccgaatcaggctgctggatacatggctaagctgatttgggaatctgtgagcgtgacggtggtagctgcggttgaagcaatgaactggcttaagtctgctgctaagctgctggctgctgaggtcaaagataagaagactggagagattcttcgcaagcgttgcgctgtgcattgggtaactcctgatggtttccctgtgtggcaggaatacaagaagcctattcagacgcgcttgaacctgatgttcctcggtcagttccgcttacagcctaccattaacaccaacaaagatagcgagattgatgcacacaaacaggagtctggtatcgctcctaactttgtacacagccaagacggtagccaccttcgtaagactgtagtgtgggcacacgagaagtacggaatcgaatcttttgcactgattcacgactccttcggtaccattccggctgacgctgcgaacctgttcaaagcagtgcgcgaaactatggttgacacatatgagtcttgtgatgtactggctgatttctacgaccagttcgctgaccagttgcacgagtctcaattggacaaaatgccagcacttccggctaaaggtaacttgaacctccgtgacatcttagagtcggacttcgcgttcgcg

SEQ ID NO: 74 - protein, 890 aa, synthetic construct
  REGION 1..890: note = Variant of RNA polymerase
MHHHHHHMNTINIAKNDFSDIELAAIPFNTLADHYGERLAREQLALEHESYEMGEARFRKMFERQLKAGEVADNAAAKPLITTLLPKMIARINDWFEEVKAKRGKRPTAFQFLQEIKPEAVAYITIKTTLACLTSADRTTVQAVASAIGRAIEDEARFGRIRDLEAKHFKKKVEEQLNKRVGHVYKKAFMQVVEADMLSKGLLGGEAWSSWHKEDSIHVGVRCIEMLIESTGMVSLHRQNAGVVGQDSETIELAPEYAEAIATRAGALAGISPMFQPCVVPPKPWTGITGGGYWANGRRPLALVRTHSKKGLMRYEDVYMPEVYKAINIAQNTAWSINKWVLAVANVITKWKHCPVRDIPAIEREELPMKPEDIDMNPEALTAWKRAKAAVYRRDKARKSRRILLEFMLEQANKFANHKAIWFPYNMDWRGRVYAVSMFNPQGNDMTKGLLTLAKGKPIGKEGYYWLKIHGANCAGVDKVPFPERIKFIEENHENIMACAKSPLENTWWAEQDLPFCFLAFCFEYAGVQHHGLSYNCSLPLAFDGSCSGIQHFSAMLRDEVGGRAVNLLPSETVQDIYGIVAKKVNEILQADAINGTDNEVVTVTDENTGEISEKVKLGTKALAGQWLAYGVTRSVTKRSVMTLAYGSKEFGFRQQVLEDTIQWAIDSGKGLMFTQPNQAAGYMAKLIWESVSVTVVAAVEAMNWLKSAAKLLAAEVKDKKTGEILRKRCAVHWVTPDGFPVWQEYKKPIQTRLNLMFLGQFRLQPTINTNKDSEIDAHKQESGIAPNFVHSQDGSHLRKTVVWAHEKYGIESFALIHDSFGTIPADAANLFKAVRETMVDTYESCDVLADFYDQFADQLHESQLDKMPALPAKGNLNLRDILESDFAFA

SEQ ID NO: 75 - DNA, 2670 bp, synthetic construct
  misc_feature 1..2670: note = Variant of RNA polymerase
  source 1..2670: mol_type = other DNA
atgcaccatcaccatcaccatatgaacacgattaacatcgctaagaacgacttctctgacatcgaactggctgctatcccgttcaacactctggctgaccattacggtgagcgtttagctcgcgaacagttggcccttgagcatgagtcttacgagatgggtgaagcacgcttccgcaagatgtttgagcgtcaacttaaagctggtgaggttgcggataacgctgccgccaagcctctcatcactaccctactccctaagatgattgcacgcatcaacgactggtttgaggaagtgaaagctaagcgcggcaagcgcccgacagccttccagttcctgcaagaaatcaagccggaagccgtagcgtacatcaccattaagaccactctggcttgcctaaccagtgcggaccgtacaaccgttcaggctgtagcaagcgcaatcggtcgggccattgaggacgaggctcgcttcggtcgtatccgtgaccttgaaaggaagcacttcaagaaaaacgttgaggaacaactcaacaagcgcgtagggcacgtctacaagaaagcatttatgcaagttgtcgaggctgacatgctctctaagggtctactcggtggcgaggcgtggtcttcgtggcataaggaagactctattcatgtaggagtacgctgcatcgagatgctcattgagtcaaccggaatggttagcttacaccgccaaaatgctggcgtagtaggtcaagactctgagactatcgaactcgcacctgaatacgctgaggctatcgcaacccgtgcaggtgcgctggctggcatctctccgatgttccaaccttgcgtagttcctcctaagccgtggactggcattactggtggtggctattgggctaacggtcgtcgtcctctggcgctggtgcgtactcacagtaagaaaggtctgatgcgctacgaagacgtttacatgcctgaggtgtacaaagcgattaacattgcgcaaaacaccgcctggtcgatcaacaagtgggtcctggcggtcgccaacgtaatcaccaagtggaagcattgtccggtccgggacatccctgcgattgagcgtgaagaactcccgatgaaaccggaagacatcgacatgaatcctgaggctctcaccgcgtggaaacgtgctaaagctgctgtgtaccgcagagacaaggctcgcaagtctcgccgtatcttgcttgagttcatgcttgagcaagccaataagtttgctaaccataaggccatctggttcccttacaacatggactggcgcggtcgtgtttacgctgtgtcaatgttcaacccgcaaggtaacgatatgaccaaaggactgcttacgctggcgaaaggtaaaccaatcggtaaggaaggttactactggctgaaaatccacggtgcaaactgtgcgggtgtcgataaggttccgttccctgagcgcatcaagttcattgaggaaaaccacgagaacatcatggcttgcgctaagtctccactggagaacacttggtgggctgagcaagatctcccgttctgcttccttgcgttctgctttgagtacgctggggtacagcaccacggcctgagctataactgctcccttccgctggcgtttgacgggtcttgctctggcatccagcacttctccgcgatgctccgagatgaggtaggtggtcgcgcggttaacttgcttcctagtgaaaccgttcaggacatctacgggattgttgctaagaaagtcaacgagattctacaagcagacgcaatcaatgggaccgataacgaagtagttaccgtgaccgatgagaacactggtgaaatctctgagaaagtcaagctgggcactaaggcactggctggtcaatggctggcttacggtgttactcgcagtgtgactaagcgttcagtcatgacgctggcttacgggtccaaagagttcggcttccgtcaacaagtgctggaagatactattcagtgggctattgattccggcaagggtctgatgttcactcagccgaatcaggctgctggatacatggctaagctgatttgggaatctgtgagcgtgacggtggtagctgcggttgaagcaatgaactggcttaagtctgctgctaagctgctggctgctgaggtcaaagataagaagactggagagattcttcgcaagcgttgcgctgtgcattgggtaactcctgatggtttccctgtgtggcaggaatacaagaagcctattcagacgcgcttgaacctgatgttcctcggtcagttccgcttacagcctaccattaacaccaacaaagatagcgagattgatgcacacaaacaggagtctggtatcgctcctaactttgtacacagccaagacggtagccaccttcgtaagactgtagtgtgggcacacgagaagtacggaatcgaatcttttgcactgattcacgactccttcggtaccattccggctgacgctgcgaacctgttcaaagcagtgcgcgaaactatggttgacacatatgagtcttgtgatgtactggctgatttctacgaccagttcgctgaccagttgcacgagtctcaattggacaaaatgccagcacttccggctaaaggtaacttgaacctccgtgacatcttagagtcggacttcgcgttcgcg

SEQ ID NO: 76 - protein, 890 aa, synthetic construct
  REGION 1..890: note = Variant of RNA polymerase
MHHHHHHMNTINIAKNDFSDIELAAIPFNTLADHYGERLAREQLALEHESYEMGEARFRKMFERQLKAGEVADNAAAKPLITTLLPKMIARINDWFEEVKAKRGKRPTAFQFLQEIKPEAVAYITIKTTLACLTSADRTTVQAVASAIGRAIEDEARFGRIRDLERKHFKKNVEEQLNKRVGHVYKKAFMQVVEADMLSKGLLGGEAWSSWHKEDSIHVGVRCIEMLIESTGMVSLHRQNAGVVGQDSETIELAPEYAEAIATRAGALAGISPMFQPCVVPPKPWTGITGGGYWANGRRPLALVRTHSKKGLMRYEDVYMPEVYKAINIAQNTAWSINKWVLAVANVITKWKHCPVRDIPAIEREELPMKPEDIDMNPEALTAWKRAKAAVYRRDKARKSRRILLEFMLEQANKFANHKAIWFPYNMDWRGRVYAVSMFNPQGNDMTKGLLTLAKGKPIGKEGYYWLKIHGANCAGVDKVPFPERIKFIEENHENIMACAKSPLENTWWAEQDLPFCFLAFCFEYAGVQHHGLSYNCSLPLAFDGSCSGIQHFSAMLRDEVGGRAVNLLPSETVQDIYGIVAKKVNEILQADAINGTDNEVVTVTDENTGEISEKVKLGTKALAGQWLAYGVTRSVTKRSVMTLAYGSKEFGFRQQVLEDTIQWAIDSGKGLMFTQPNQAAGYMAKLIWESVSVTVVAAVEAMNWLKSAAKLLAAEVKDKKTGEILRKRCAVHWVTPDGFPVWQEYKKPIQTRLNLMFLGQFRLQPTINTNKDSEIDAHKQESGIAPNFVHSQDGSHLRKTVVWAHEKYGIESFALIHDSFGTIPADAANLFKAVRETMVDTYESCDVLADFYDQFADQLHESQLDKMPALPAKGNLNLRDILESDFAFA

SEQ ID NO: 77 - DNA, 2670 bp, synthetic construct
  misc_feature 1..2670: note = Variant of RNA polymerase
  source 1..2670: mol_type = other DNA
atgcaccatcaccatcaccatatgaacacgattaacatcgctaagaacgacttctctgacatcgaactggctgctatcccgttcaacactctggctgaccattacggtgagcgtttagctcgcgaacagttggcccttgagcatgagtcttacgagatgggtgaagcacgcttccgcaagatgtttgagcgtcaacttaaagctggtgaggttgcggataacgctgccgccaagcctctcatcactaccctactccctaagatgattgcacgcatcaacgactggtttgaggaagtgaaagctaagcgcggcaagcgcccgacagccttccagttcctgcaagaaatcaagccggaagccgtagcgtacatcaccattaagaccactctggcttgcctaaccagtgcggaccgtacaaccgttcaggctgtagcaagcgcaatcggtcgggccattgaggacgaggctcgcttcggtcgtatccgtgaccttgaagctaagaagttcaagaaaaacgttgaggaacaactcaacaagcgcgtagggcacgtctacaagaaagcatttatgcaagttgtcgaggctgacatgctctctaagggtctactcggtggcgaggcgtggtcttcgtggcataaggaagactctattcatgtaggagtacgctgcatcgagatgctcattgagtcaaccggaatggttagcttacaccgccaaaatgctggcgtagtaggtcaagactctgagactatcgaactcgcacctgaatacgctgaggctatcgcaacccgtgcaggtgcgctggctggcatctctccgatgttccaaccttgcgtagttcctcctaagccgtggactggcattactggtggtggctattgggctaacggtcgtcgtcctctggcgctggtgcgtactcacagtaagaaaggtctgatgcgctacgaagacgtttacatgcctgaggtgtacaaagcgattaacattgcgcaaaacaccgcctggtcgatcaacaagtgggtcctggcggtcgccaacgtaatcaccaagtggaagcattgtccggtccgggacatccctgcgattgagcgtgaagaactcccgatgaaaccggaagacatcgacatgaatcctgaggctctcaccgcgtggaaacgtgctaaagctgctgtgtaccgcagagacaaggctcgcaagtctcgccgtatcttgcttgagttcatgcttgagcaagccaataagtttgctaaccataaggccatctggttcccttacaacatggactggcgcggtcgtgtttacgctgtgtcaatgttcaacccgcaaggtaacgatatgaccaaaggactgcttacgctggcgaaaggtaaaccaatcggtaaggaaggttactactggctgaaaatccacggtgcaaactgtgcgggtgtcgataaggttccgttccctgagcgcatcaagttcattgaggaaaaccacgagaacatcatggcttgcgctaagtctccactggagaacacttggtgggctgagcaagatctcccgttctgcttccttgcgttctgctttgagtacgctggggtacagcaccacggcctgagctataactgctcccttccgctggcgtttgacgggtcttgctctggcatccagcacttctccgcgatgctccgagatgaggtaggtggtcgcgcggttaacttgcttcctagtgaaaccgttcaggacatctacgggattgttgctaagaaagtcaacgagattctacaagcagacgcaatcaatgggaccgataacgaagtagttaccgtgaccgatgagaacactggtgaaatctctgagaaagtcaagctgggcactaaggcactggctggtcaatggctggcttacggtgttactcgcagtgtgactaagcgttcagtcatgacgctggcttacgggtccaaagagttcggcttccgtcaacaagtgctggaagatactattcagtgggctattgattccggcaagggtctgatgttcactcagccgaatcaggctgctggatacatggctaagctgatttgggaatctgtgagcgtgacggtggtagctgcggttgaagcaatgaactggcttaagtctgctgctaagctgctggctgctgaggtcaaagataagaagactggagagattcttcgcaagcgttgcgctgtgcattgggtaactcctgatggtttccctgtgtggcaggaatacaagaagcctattcagacgcgcttgaacctgatgttcctcggtcagttccgcttacagcctaccattaacaccaacaaagatagcgagattgatgcacacaaacaggagtctggtatcgctcctaactttgtacacagccaagacggtagccaccttcgtaagactgtagtgtgggcacacgagaagtacggaatcgaatcttttgcactgattcacgactccttcggtaccattccggctgacgctgcgaacctgttcaaagcagtgcgcgaaactatggttgacacatatgagtcttgtgatgtactggctgatttctacgaccagttcgctgaccagttgcacgagtctcaattggacaaaatgccagcacttccggctaaaggtaacttgaacctccgtgacatcttagagtcggacttcgcgttcgcg

SEQ ID NO: 78 - protein, 890 aa, synthetic construct
  REGION 1..890: note = Variant of RNA polymerase
MHHHHHHMNTINIAKNDFSDIELAAIPFNTLADHYGERLAREQLALEHESYEMGEARFRKMFERQLKAGEVADNAAAKPLITTLLPKMIARINDWFEEVKAKRGKRPTAFQFLQEIKPEAVAYITIKTTLACLTSADRTTVQAVASAIGRAIEDEARFGRIRDLEAKKFKKNVEEQLNKRVGHVYKKAFMQVVEADMLSKGLLGGEAWSSWHKEDSIHVGVRCIEMLIESTGMVSLHRQNAGVVGQDSETIELAPEYAEAIATRAGALAGISPMFQPCVVPPKPWTGITGGGYWANGRRPLALVRTHSKKGLMRYEDVYMPEVYKAINIAQNTAWSINKWVLAVANVITKWKHCPVRDIPAIEREELPMKPEDIDMNPEALTAWKRAKAAVYRRDKARKSRRILLEFMLEQANKFANHKAIWFPYNMDWRGRVYAVSMFNPQGNDMTKGLLTLAKGKPIGKEGYYWLKIHGANCAGVDKVPFPERIKFIEENHENIMACAKSPLENTWWAEQDLPFCFLAFCFEYAGVQHHGLSYNCSLPLAFDGSCSGIQHFSAMLRDEVGGRAVNLLPSETVQDIYGIVAKKVNEILQADAINGTDNEVVTVTDENTGEISEKVKLGTKALAGQWLAYGVTRSVTKRSVMTLAYGSKEFGFRQQVLEDTIQWAIDSGKGLMFTQPNQAAGYMAKLIWESVSVTVVAAVEAMNWLKSAAKLLAAEVKDKKTGEILRKRCAVHWVTPDGFPVWQEYKKPIQTRLNLMFLGQFRLQPTINTNKDSEIDAHKQESGIAPNFVHSQDGSHLRKTVVWAHEKYGIESFALIHDSFGTIPADAANLFKAVRETMVDTYESCDVLADFYDQFADQLHESQLDKMPALPAKGNLNLRDILESDFAFA

SEQ ID NO: 79 - DNA, 2670 bp, synthetic construct
  misc_feature 1..2670: note = Variant of RNA polymerase
  source 1..2670: mol_type = other DNA
atgcaccatcaccatcaccatatgaacacgattaacatcgctaagaacgacttctctgacatcgaactggctgctatcccgttcaacactctggctgaccattacggtgagcgtttagctcgcgaacagttggcccttgagcatgagtcttacgagatgggtgaagcacgcttccgcaagatgtttgagcgtcaacttaaagctggtgaggttgcggataacgctgccgccaagcctctcatcactaccctactccctaagatgattgcacgcatcaacgactggtttgaggaagtgaaagctaagcgcggcaagcgcccgacagccttccagttcctgcaagaaatcaagccggaagccgtagcgtacatcaccattaagaccactctggcttgcctaaccagtgcggaccgtacaaccgttcaggctgtagcaagcgcaatcggtcgggccattgaggacgaggctcgcttcggtcgtatccgtgaccttgaagtgaagcacttcaagaaaaacgttgaggaacaactcaacaagcgcgtagggcacgtctacaagaaagcatttatgcaagttgtcgaggctgacatgctctctaagggtctactcggtggcgaggcgtggtcttcgtggcataaggaagactctattcatgtaggagtacgctgcatcgagatgctcattgagtcaaccggaatggttagcttacaccgccaaaatgctggcgtagtaggtcaagactctgagactatcgaactcgcacctgaatacgctgaggctatcgcaacccgtgcaggtgcgctggctggcattaatcctttgtaccaaccatgcgtagttcctcctaagccgtggactggcattactggtggtggctattgggctaacggtcgtcgtcctctggcgctggtgcgtactcacagtaagaaaggtctgatgcgctacgaagacgtttacatgcctgaggtgtacaaagcgattaacattgcgcaaaacaccgcctggtcgatcaacaagtgggtcctggcggtcgccaacgtaatcaccaagtggaagcattgtccggtccgggacatccctgcgattgagcgtgaagaactcccgatgaaaccggaagacatcgacatgaatcctgaggctctcaccgcgtggaaacgtgctaaagctgctgtgtaccgcagagacaaggctcgcaagtctcgccgtatcttgcttgagttcatgcttgagcaagccaataagtttgctaaccataaggccatctggttcccttacaacatggactggcgcggtcgtgtttacgctgtgtcaatgttcaacccgcaaggtaacgatatgaccaaaggactgcttacgctggcgaaaggtaaaccaatcggtaaggaaggttactactggctgaaaatccacggtgcaaactgtgcgggtgtcgataaggttccgttccctgagcgcatcaagttcattgaggaaaaccacgagaacatcatggcttgcgctaagtctccactggagaacacttggtgggctgagcaagatctcccgttctgcttccttgcgttctgctttgagtacgctggggtacagcaccacggcctgagctataactgctcccttccgctggcgtttgacgggtcttgctctggcatccagcacttctccgcgatgctccgagatgaggtaggtggtcgcgcggttaacttgcttcctagtgaaaccgttcaggacatctacgggattgttgctaagaaagtcaacgagattctacaagcagacgcaatcaatgggaccgataacgaagtagttaccgtgaccgatgagaacactggtgaaatctctgagaaagtcaagctgggcactaaggcactggctggtcaatggctggcttacggtgttactcgcagtgtgactaagcgttcagtcatgacgctggcttacgggtccaaagagttcggcttccgtcaacaagtgctggaagatactattcagtgggctattgattccggcaagggtctgatgttcactcagccgaatcaggctgctggatacatggctaagctgatttgggaatctgtgagcgtgacggtggtagctgcggttgaagcaatgaactggcttaagtctgctgctaagctgctggctgctgaggtcaaagataagaagactggagagattcttcgcaagcgttgcgctgtgcattgggtaactcctgatggtttccctgtgtggcaggaatacaagaagcctattcagacgcgcttgaacctgatgttcctcggtcagttccgcttacagcctaccattaacaccaacaaagatagcgagattgatgcacacaaacaggagtctggtatcgctcctaactttgtacacagccaagacggtagccaccttcgtaagactgtagtgtgggcacacgagaagtacggaatcgaatcttttgcactgattcacgactccttcggtaccattccggctgacgctgcgaacctgttcaaagcagtgcgcgaaactatggttgacacatatgagtcttgtgatgtactggctgatttctacgaccagttcgctgaccagttgcacgagtctcaattggacaaaatgccagcacttccggctaaaggtaacttgaacctccgtgacatcttagagtcggacttcgcgttcgcg

SEQ ID NO: 80 - protein, 890 aa, synthetic construct
  REGION 1..890: note = Variant of RNA polymerase
MHHHHHHMNTINIAKNDFSDIELAAIPFNTLADHYGERLAREQLALEHESYEMGEARFRKMFERQLKAGEVADNAAAKPLITTLLPKMIARINDWFEEVKAKRGKRPTAFQFLQEIKPEAVAYITIKTTLACLTSADRTTVQAVASAIGRAIEDEARFGRIRDLEVKHFKKNVEEQLNKRVGHVYKKAFMQVVEADMLSKGLLGGEAWSSWHKEDSIHVGVRCIEMLIESTGMVSLHRQNAGVVGQDSETIELAPEYAEAIATRAGALAGINPLYQPCVVPPKPWTGITGGGYWANGRRPLALVRTHSKKGLMRYEDVYMPEVYKAINIAQNTAWSINKWVLAVANVITKWKHCPVRDIPAIEREELPMKPEDIDMNPEALTAWKRAKAAVYRRDKARKSRRILLEFMLEQANKFANHKAIWFPYNMDWRGRVYAVSMFNPQGNDMTKGLLTLAKGKPIGKEGYYWLKIHGANCAGVDKVPFPERIKFIEENHENIMACAKSPLENTWWAEQDLPFCFLAFCFEYAGVQHHGLSYNCSLPLAFDGSCSGIQHFSAMLRDEVGGRAVNLLPSETVQDIYGIVAKKVNEILQADAINGTDNEVVTVTDENTGEISEKVKLGTKALAGQWLAYGVTRSVTKRSVMTLAYGSKEFGFRQQVLEDTIQWAIDSGKGLMFTQPNQAAGYMAKLIWESVSVTVVAAVEAMNWLKSAAKLLAAEVKDKKTGEILRKRCAVHWVTPDGFPVWQEYKKPIQTRLNLMFLGQFRLQPTINTNKDSEIDAHKQESGIAPNFVHSQDGSHLRKTVVWAHEKYGIESFALIHDSFGTIPADAANLFKAVRETMVDTYESCDVLADFYDQFADQLHESQLDKMPALPAKGNLNLRDILESDFAFA

SEQ ID NO: 81 - DNA, 2670 bp, synthetic construct
  misc_feature 1..2670: note = Variant of RNA polymerase
  source 1..2670: mol_type = other DNA
atgcaccatcaccatcaccatatgaacacgattaacatcgctaagaacgacttctctgacatcgaactggctgctatcccgttcaacactctggctgaccattacggtgagcgtttagctcgcgaacagttggcccttgagcatgagtcttacgagatgggtgaagcacgcttccgcaagatgtttgagcgtcaacttaaagctggtgaggttgcggataacgctgccgccaagcctctcatcactaccctactccctaagatgattgcacgcatcaacgactggtttgaggaagtgaaagctaagcgcggcaagcgcccgacagccttccagttcctgcaagaaatcaagccggaagccgtagcgtacatcaccattaagaccactctggcttgcctaaccagtgcggaccgtacaaccgttcaggctgtagcaagcgcaatcggtcgggccattgaggacgaggctcgcttcggtcgtatccgtgaccttgaagctaagcacttccggaaaaacgttgaggaacaactcaacaagcgcgtagggcacgtctacaagaaagcatttatgcaagttgtcgaggctgacatgctctctaagggtctactcggtggcgaggcgtggtcttcgtggcataaggaagactctattcatgtaggagtacgctgcatcgagatgctcattgagtcaaccggaatggttagcttacaccgccaaaatgctggcgtagtaggtcaagactctgagactatcgaactcgcacctgaatacgctgaggctatcgcaacccgtgcaggtgcgctggctggcatctctccgatgttccaaccttgcgtagttcctcctaagccgtggactggcattactggtggtggctattgggctaacggtcgtcgtcctctggcgctggtgcgtactcacagtaagaaaggtctgatgcgctacgaagacgtttacatgcctgaggtgtacaaagcgattaacattgcgcaaaacaccgcctggtcgatcaacaagtgggtcctggcggtcgccaacgtaatcaccaagtggaagcattgtccggtccgggacatccctgcgattgagcgtgaagaactcccgatgaaaccggaagacatcgacatgaatcctgaggctctcaccgcgtggaaacgtgctaaagctgctgtgtaccgcagagacaaggctcgcaagtctcgccgtatcttgcttgagttcatgcttgagcaagccaataagtttgctaaccataaggccatctggttcccttacaacatggactggcgcggtcgtgtttacgctgtgtcaatgttcaacccgcaaggtaacgatatgaccaaaggactgcttacgctggcgaaaggtaaaccaatcggtaaggaaggttactactggctgaaaatccacggtgcaaactgtgcgggtgtcgataaggttccgttccctgagcgcatcaagttcattgaggaaaaccacgagaacatcatggcttgcgctaagtctccactggagaacacttggtgggctgagcaagatctcccgttctgcttccttgcgttctgctttgagtacgctggggtacagcaccacggcctgagctataactgctcccttccgctggcgtttgacgggtcttgctctggcatccagcacttctccgcgatgctccgagatgaggtaggtggtcgcgcggttaacttgcttcctagtgaaaccgttcaggacatctacgggattgttgctaagaaagtcaacgagattctacaagcagacgcaatcaatgggaccgataacgaagtagttaccgtgaccgatgagaacactggtgaaatctctgagaaagtcaagctgggcactaaggcactggctggtcaatggctggcttacggtgttactcgcagtgtgactaagcgttcagtcatgacgctggcttacgggtccaaagagttcggcttccgtcaacaagtgctggaagatactattcagtgggctattgattccggcaagggtctgatgttcactcagccgaatcaggctgctggatacatggctaagctgatttgggaatctgtgagcgtgacggtggtagctgcggttgaagcaatgaactggcttaagtctgctgctaagctgctggctgctgaggtcaaagataagaagactggagagattcttcgcaagcgttgcgctgtgcattgggtaactcctgatggtttccctgtgtggcaggaatacaagaagcctattcagacgcgcttgaacctgatgttcctcggtcagttccgcttacagcctaccattaacaccaacaaagatagcgagattgatgcacacaaacaggagtctggtatcgctcctaactttgtacacagccaagacggtagccaccttcgtaagactgtagtgtgggcacacgagaagtacggaatcgaatcttttgcactgattcacgactccttcggtaccattccggctgacgctgcgaacctgttcaaagcagtgcgcgaaactatggttgacacatatgagtcttgtgatgtactggctgatttctacgaccagttcgctgaccagttgcacgagtctcaattggacaaaatgccagcacttccggctaaaggtaacttgaacctccgtgacatcttagagtcggacttcgcgttcgcg

SEQ ID NO: 82 - protein, 890 aa, synthetic construct
  REGION 1..890: note = Variant of RNA polymerase
MHHHHHHMNTINIAKNDFSDIELAAIPFNTLADHYGERLAREQLALEHESYEMGEARFRKMFERQLKAGEVADNAAAKPLITTLLPKMIARINDWFEEVKAKRGKRPTAFQFLQEIKPEAVAYITIKTTLACLTSADRTTVQAVASAIGRAIEDEARFGRIRDLEAKHFRKNVEEQLNKRVGHVYKKAFMQVVEADMLSKGLLGGEAWSSWHKEDSIHVGVRCIEMLIESTGMVSLHRQNAGVVGQDSETIELAPEYAEAIATRAGALAGISPMFQPCVVPPKPWTGITGGGYWANGRRPLALVRTHSKKGLMRYEDVYMPEVYKAINIAQNTAWSINKWVLAVANVITKWKHCPVRDIPAIEREELPMKPEDIDMNPEALTAWKRAKAAVYRRDKARKSRRILLEFMLEQANKFANHKAIWFPYNMDWRGRVYAVSMFNPQGNDMTKGLLTLAKGKPIGKEGYYWLKIHGANCAGVDKVPFPERIKFIEENHENIMACAKSPLENTWWAEQDLPFCFLAFCFEYAGVQHHGLSYNCSLPLAFDGSCSGIQHFSAMLRDEVGGRAVNLLPSETVQDIYGIVAKKVNEILQADAINGTDNEVVTVTDENTGEISEKVKLGTKALAGQWLAYGVTRSVTKRSVMTLAYGSKEFGFRQQVLEDTIQWAIDSGKGLMFTQPNQAAGYMAKLIWESVSVTVVAAVEAMNWLKSAAKLLAAEVKDKKTGEILRKRCAVHWVTPDGFPVWQEYKKPIQTRLNLMFLGQFRLQPTINTNKDSEIDAHKQESGIAPNFVHSQDGSHLRKTVVWAHEKYGIESFALIHDSFGTIPADAANLFKAVRETMVDTYESCDVLADFYDQFADQLHESQLDKMPALPAKGNLNLRDILESDFAFA

SEQ ID NO: 83 - DNA, 2670 bp, synthetic construct
  misc_feature 1..2670: note = Variant of RNA polymerase
  source 1..2670: mol_type = other DNA
atgcaccatcaccatcaccatatgaacacgattaacatcgctaagaacgacttctctgacatcgaactggctgctatcccgttcaacactctggctgaccattacggtgagcgtttagctcgcgaacagttggcccttgagcatgagtcttacgagatgggtgaagcacgcttccgcaagatgtttgagcgtcaacttaaagctggtgaggttgcggataacgctgccgccaagcctctcatcactaccctactccctaagatgattgcacgcatcaacgactggtttgaggaagtgaaagctaagcgcggcaagcgcccgacagccttccagttcctgcaagaaatcaagccggaagccgtagcgtacatcaccattaagaccactctggcttgcctaaccagtgcggaccgtacaaccgttcaggctgtagcaagcgcaatcggtcgggccattgaggacgaggctcgcttcggtcgtatccgtgaccttgaagctaagcacttgaagaaaaacgttgaggaacaactcaacaagcgcgtagggcacgtctacaagaaagcatttatgcaagttgtcgaggctgacatgctctctaagggtctactcggtggcgaggcgtggtcttcgtggcataaggaagactctattcatgtaggagtacgctgcatcgagatgctcattgagtcaaccggaatggttagcttacaccgccaaaatgctggcgtagtaggtcaagactctgagactatcgaactcgcacctgaatacgctgaggctatcgcaacccgtgcaggtgcgctggctggcatctctccgatgttccaaccttgcgtagttcctcctaagccgtggactggcattactggtggtggctattgggctaacggtcgtcgtcctctggcgctggtgcgtactcacagtaagaaaggtctgatgcgctacgaagacgtttacatgcctgaggtgtacaaagcgattaacattgcgcaaaacaccgcctggtcgatcaacaagtgggtcctggcggtcgccaacgtaatcaccaagtggaagcattgtccggtccgggacatccctgcgattgagcgtgaagaactcccgatgaaaccggaagacatcgacatgaatcctgaggctctcaccgcgtggaaacgtgctaaagctgctgtgtaccgcagagacaaggctcgcaagtctcgccgtatcttgcttgagttcatgcttgagcaagccaataagtttgctaaccataaggccatctggttcccttacaacatggactggcgcggtcgtgtttacgctgtgtcaatgttcaacccgcaaggtaacgatatgaccaaaggactgcttacgctggcgaaaggtaaaccaatcggtaaggaaggttactactggctgaaaatccacggtgcaaactgtgcgggtgtcgataaggttccgttccctgagcgcatcaagttcattgaggaaaaccacgagaacatcatggcttgcgctaagtctccactggagaacacttggtgggctgagcaagatctcccgttctgcttccttgcgttctgctttgagtacgctggggtacagcaccacggcctgagctataactgctcccttccgctggcgtttgacgggtcttgctctggcatccagcacttctccgcgatgctccgagatgaggtaggtggtcgcgcggttaacttgcttcctagtgaaaccgttcaggacatctacgggattgttgctaagaaagtcaacgagattctacaagcagacgcaatcaatgggaccgataacgaagtagttaccgtgaccgatgagaacactggtgaaatctctgagaaagtcaagctgggcactaaggcactggctggtcaatggctggcttacggtgttactcgcagtgtgactaagcgttcagtcatgacgctggcttacgggtccaaagagttcggcttccgtcaacaagtgctggaagatactattcagtgggctattgattccggcaagggtctgatgttcactcagccgaatcaggctgctggatacatggctaagctgatttgggaatctgtgagcgtgacggtggtagctgcggttgaagcaatgaactggcttaagtctgctgctaagctgctggctgctgaggtcaaagataagaagactggagagattcttcgcaagcgttgcgctgtgcattgggtaactcctgatggtttccctgtgtggcaggaatacaagaagcctattcagacgcgcttgaacctgatgttcctcggtcagttccgcttacagcctaccattaacaccaacaaagatagcgagattgatgcacacaaacaggagtctggtatcgctcctaactttgtacacagccaagacggtagccaccttcgtaagactgtagtgtgggcacacgagaagtacggaatcgaatcttttgcactgattcacgactccttcggtaccattccggctgacgctgcgaacctgttcaaagcagtgcgcgaaactatggttgacacatatgagtcttgtgatgtactggctgatttctacgaccagttcgctgaccagttgcacgagtctcaattggacaaaatgccagcacttccggctaaaggtaacttgaacctccgtgacatcttagagtcggacttcgcgttcgcg

SEQ ID NO: 84 - protein, 890 aa, synthetic construct
  REGION 1..890: note = Variant of RNA polymerase
MHHHHHHMNTINIAKNDFSDIELAAIPFNTLADHYGERLAREQLALEHESYEMGEARFRKMFERQLKAGEVADNAAAKPLITTLLPKMIARINDWFEEVKAKRGKRPTAFQFLQEIKPEAVAYITIKTTLACLTSADRTTVQAVASAIGRAIEDEARFGRIRDLEAKHLKKNVEEQLNKRVGHVYKKAFMQVVEADMLSKGLLGGEAWSSWHKEDSIHVGVRCIEMLIESTGMVSLHRQNAGVVGQDSETIELAPEYAEAIATRAGALAGISPMFQPCVVPPKPWTGITGGGYWANGRRPLALVRTHSKKGLMRYEDVYMPEVYKAINIAQNTAWSINKWVLAVANVITKWKHCPVRDIPAIEREELPMKPEDIDMNPEALTAWKRAKAAVYRRDKARKSRRILLEFMLEQANKFANHKAIWFPYNMDWRGRVYAVSMFNPQGNDMTKGLLTLAKGKPIGKEGYYWLKIHGANCAGVDKVPFPERIKFIEENHENIMACAKSPLENTWWAEQDLPFCFLAFCFEYAGVQHHGLSYNCSLPLAFDGSCSGIQHFSAMLRDEVGGRAVNLLPSETVQDIYGIVAKKVNEILQADAINGTDNEVVTVTDENTGEISEKVKLGTKALAGQWLAYGVTRSVTKRSVMTLAYGSKEFGFRQQVLEDTIQWAIDSGKGLMFTQPNQAAGYMAKLIWESVSVTVVAAVEAMNWLKSAAKLLAAEVKDKKTGEILRKRCAVHWVTPDGFPVWQEYKKPIQTRLNLMFLGQFRLQPTINTNKDSEIDAHKQESGIAPNFVHSQDGSHLRKTVVWAHEKYGIESFALIHDSFGTIPADAANLFKAVRETMVDTYESCDVLADFYDQFADQLHESQLDKMPALPAKGNLNLRDILESDFAFA

SEQ ID NO: 85 - DNA, 2670 bp, synthetic construct
  misc_feature 1..2670: note = Variant of RNA polymerase
  source 1..2670: mol_type = other DNA
atgcaccatcaccatcaccatatgaacacgattaacatcgctaagaacgacttctctgacatcgaactggctgctatcccgttcaacactctggctgaccattacggtgagcgtttagctcgcgaacagttggcccttgagcatgagtcttacgagatgggtgaagcacgcttccgcaagatgtttgagcgtcaacttaaagctggtgaggttgcggataacgctgccgccaagcctctcatcactaccctactccctaagatgattgcacgcatcaacgactggtttgaggaagtgaaagctaagcgcggcaagcgcccgacagccttccagttcctgcaagaaatcaagccggaagccgtagcgtacatcaccattaagaccactctggcttgcctaaccagtgcggaccgtacaaccgttcaggctgtagcaagcgcaatcggtcgggccattgaggacgaggctcgcttcggtcgtatccgtgaccttgaagctaagcacttcaagaaaaacgttgaggaacaactcaacaagcgcgtagggcacgtctacaagaaagcatttatgcaagttgtcgaggctgacatgctctctaagggtctactcggtggcgagtcttggtcttcgtggcataaggaagactctattcatgtaggagtacgctgcatcgagatgctcattgagtcaaccggaatggttagcttacaccgccaaaatgctggcgtagtaggtcaagactctgagactatcgaactcgcacctgaatacgctgaggctatcgcaacccgtgcaggtgcgctggctggcatctctccgatgttccaaccttgcgtagttcctcctaagccgtggactggcattactggtggtggctattgggctaacggtcgtcgtcctctggcgctggtgcgtactcacagtaagaaaggtctgatgcgctacgaagacgtttacatgcctgaggtgtacaaagcgattaacattgcgcaaaacaccgcctggtcgatcaacaagtgggtcctggcggtcgccaacgtaatcaccaagtggaagcattgtccggtccgggacatccctgcgattgagcgtgaagaactcccgatgaaaccggaagacatcgacatgaatcctgaggctctcaccgcgtggaaacgtgctaaagctgctgtgtaccgcagagacaaggctcgcaagtctcgccgtatcttgcttgagttcatgcttgagcaagccaataagtttgctaaccataaggccatctggttcccttacaacatggactggcgcggtcgtgtttacgctgtgtcaatgttcaacccgcaaggtaacgatatgaccaaaggactgcttacgctggcgaaaggtaaaccaatcggtaaggaaggttactactggctgaaaatccacggtgcaaactgtgcgggtgtcgataaggttccgttccctgagcgcatcaagttcattgaggaaaaccacgagaacatcatggcttgcgctaagtctccactggagaacacttggtgggctgagcaagatctcccgttctgcttccttgcgttctgctttgagtacgctggggtacagcaccacggcctgagctataactgctcccttccgctggcgtttgacgggtcttgctctggcatccagcacttctccgcgatgctccgagatgaggtaggtggtcgcgcggttaacttgcttcctagtgaaaccgttcaggacatctacgggattgttgctaagaaagtcaacgagattctacaagcagacgcaatcaatgggaccgataacgaagtagttaccgtgaccgatgagaacactggtgaaatctctgagaaagtcaagctgggcactaaggcactggctggtcaatggctggcttacggtgttactcgcagtgtgactaagcgttcagtcatgacgctggcttacgggtccaaagagttcggcttccgtcaacaagtgctggaagatactattcagtgggctattgattccggcaagggtctgatgttcactcagccgaatcaggctgctggatacatggctaagctgatttgggaatctgtgagcgtgacggtggtagctgcggttgaagcaatgaactggcttaagtctgctgctaagctgctggctgctgaggtcaaagataagaagactggagagattcttcgcaagcgttgcgctgtgcattgggtaactcctgatggtttccctgtgtggcaggaatacaagaagcctattcagacgcgcttgaacctgatgttcctcggtcagttccgcttacagcctaccattaacaccaacaaagatagcgagattgatgcacacaaacaggagtctggtatcgctcctaactttgtacacagccaagacggtagccaccttcgtaagactgtagtgtgggcacacgagaagtacggaatcgaatcttttgcactgattcacgactccttcggtaccattccggctgacgctgcgaacctgttcaaagcagtgcgcgaaactatggttgacacatatgagtcttgtgatgtactggctgatttctacgaccagttcgctgaccagttgcacgagtctcaattggacaaaatgccagcacttccggctaaaggtaacttgaacctccgtgacatcttagagtcggacttcgcgttcgcg

SEQ ID NO: 86 - protein, 890 aa, synthetic construct
  REGION 1..890: note = Variant of RNA polymerase
MHHHHHHMNTINIAKNDFSDIELAAIPFNTLADHYGERLAREQLALEHESYEMGEARFRKMFERQLKAGEVADNAAAKPLITTLLPKMIARINDWFEEVKAKRGKRPTAFQFLQEIKPEAVAYITIKTTLACLTSADRTTVQAVASAIGRAIEDEARFGRIRDLEAKHFKKNVEEQLNKRVGHVYKKAFMQVVEADMLSKGLLGGESWSSWHKEDSIHVGVRCIEMLIESTGMVSLHRQNAGVVGQDSETIELAPEYAEAIATRAGALAGISPMFQPCVVPPKPWTGITGGGYWANGRRPLALVRTHSKKGLMRYEDVYMPEVYKAINIAQNTAWSINKWVLAVANVITKWKHCPVRDIPAIEREELPMKPEDIDMNPEALTAWKRAKAAVYRRDKARKSRRILLEFMLEQANKFANHKAIWFPYNMDWRGRVYAVSMFNPQGNDMTKGLLTLAKGKPIGKEGYYWLKIHGANCAGVDKVPFPERIKFIEENHENIMACAKSPLENTWWAEQDLPFCFLAFCFEYAGVQHHGLSYNCSLPLAFDGSCSGIQHFSAMLRDEVGGRAVNLLPSETVQDIYGIVAKKVNEILQADAINGTDNEVVTVTDENTGEISEKVKLGTKALAGQWLAYGVTRSVTKRSVMTLAYGSKEFGFRQQVLEDTIQWAIDSGKGLMFTQPNQAAGYMAKLIWESVSVTVVAAVEAMNWLKSAAKLLAAEVKDKKTGEILRKRCAVHWVTPDGFPVWQEYKKPIQTRLNLMFLGQFRLQPTINTNKDSEIDAHKQESGIAPNFVHSQDGSHLRKTVVWAHEKYGIESFALIHDSFGTIPADAANLFKAVRETMVDTYESCDVLADFYDQFADQLHESQLDKMPALPAKGNLNLRDILESDFAFA

SEQ ID NO: 87 - DNA, 2670 bp, synthetic construct
  misc_feature 1..2670: note = Variant of RNA polymerase
  source 1..2670: mol_type = other DNA
atgcaccatcaccatcaccatatgaacacgattaacatcgctaagaacgacttctctgacatcgaactggctgctatcccgttcaacactctggctgaccattacggtgagcgtttagctcgcgaacagttggcccttgagcatgagtcttacgagatgggtgaagcacgcttccgcaagatgtttgagcgtcaacttaaagctggtgaggttgcggataacgctgccgccaagcctctcatcactaccctactccctaagatgattgcacgcatcaacgactggtttgaggaagtgaaagctaagcgcggcaagcgcccgacagccttccagttcctgcaagaaatcaagccggaagccgtagcgtacatcaccattaagaccactctggcttgcctaaccagtgcggaccgtacaaccgttcaggctgtagcaagcgcaatcggtcgggccattgaggacgaggctcgcttcggtcgtatccgtgaccttgaagctaagcacggtaagaaaaacgttgaggaacaactcaacaagcgcgtagggcacgtctacaagaaagcatttatgcaagttgtcgaggctgacatgctctctaagggtctactcggtggcgaggcgtggtcttcgtggcataaggaagactctattcatgtaggagtacgctgcatcgagatgctcattgagtcaaccggaatggttagcttacaccgccaaaatgctggcgtagtaggtcaagactctgagactatcgaactcgcacctgaatacgctgaggctatcgcaacccgtgcaggtgcgctggctggcatctctccgatgttccaaccttgcgtagttcctcctaagccgtggactggcattactggtggtggctattgggctaacggtcgtcgtcctctggcgctggtgcgtactcacagtaagaaaggtctgatgcgctacgaagacgtttacatgcctgaggtgtacaaagcgattaacattgcgcaaaacaccgcctggtcgatcaacaagtgggtcctggcggtcgccaacgtaatcaccaagtggaagcattgtccggtccgggacatccctgcgattgagcgtgaagaactcccgatgaaaccggaagacatcgacatgaatcctgaggctctcaccgcgtggaaacgtgctaaagctgctgtgtaccgcagagacaaggctcgcaagtctcgccgtatcttgcttgagttcatgcttgagcaagccaataagtttgctaaccataaggccatctggttcccttacaacatggactggcgcggtcgtgtttacgctgtgtcaatgttcaacccgcaaggtaacgatatgaccaaaggactgcttacgctggcgaaaggtaaaccaatcggtaaggaaggttactactggctgaaaatccacggtgcaaactgtgcgggtgtcgataaggttccgttccctgagcgcatcaagttcattgaggaaaaccacgagaacatcatggcttgcgctaagtctccactggagaacacttggtgggctgagcaagatctcccgttctgcttccttgcgttctgctttgagtacgctggggtacagcaccacggcctgagctataactgctcccttccgctggcgtttgacgggtcttgctctggcatccagcacttctccgcgatgctccgagatgaggtaggtggtcgcgcggttaacttgcttcctagtgaaaccgttcaggacatctacgggattgttgctaagaaagtcaacgagattctacaagcagacgcaatcaatgggaccgataacgaagtagttaccgtgaccgatgagaacactggtgaaatctctgagaaagtcaagctgggcactaaggcactggctggtcaatggctggcttacggtgttactcgcagtgtgactaagcgttcagtcatgacgctggcttacgggtccaaagagttcggcttccgtcaacaagtgctggaagatactattcagtgggctattgattccggcaagggtctgatgttcactcagccgaatcaggctgctggatacatggctaagctgatttgggaatctgtgagcgtgacggtggtagctgcggttgaagcaatgaactggcttaagtctgctgctaagctgctggctgctgaggtcaaagataagaagactggagagattcttcgcaagcgttgcgctgtgcattgggtaactcctgatggtttccctgtgtggcaggaatacaagaagcctattcagacgcgcttgaacctgatgttcctcggtcagttccgcttacagcctaccattaacaccaacaaagatagcgagattgatgcacacaaacaggagtctggtatcgctcctaactttgtacacagccaagacggtagccaccttcgtaagactgtagtgtgggcacacgagaagtacggaatcgaatcttttgcactgattcacgactccttcggtaccattccggctgacgctgcgaacctgttcaaagcagtgcgcgaaactatggttgacacatatgagtcttgtgatgtactggctgatttctacgaccagttcgctgaccagttgcacgagtctcaattggacaaaatgccagcacttccggctaaaggtaacttgaacctccgtgacatcttagagtcggacttcgcgttcgcg

SEQ ID NO: 88 - protein, 890 aa, synthetic construct
  REGION 1..890: note = Variant of RNA polymerase
MHHHHHHMNTINIAKNDFSDIELAAIPFNTLADHYGERLAREQLALEHESYEMGEARFRKMFERQLKAGEVADNAAAKPLITTLLPKMIARINDWFEEVKAKRGKRPTAFQFLQEIKPEAVAYITIKTTLACLTSADRTTVQAVASAIGRAIEDEARFGRIRDLEAKHGKKNVEEQLNKRVGHVYKKAFMQVVEADMLSKGLLGGEAWSSWHKEDSIHVGVRCIEMLIESTGMVSLHRQNAGVVGQDSETIELAPEYAEAIATRAGALAGISPMFQPCVVPPKPWTGITGGGYWANGRRPLALVRTHSKKGLMRYEDVYMPEVYKAINIAQNTAWSINKWVLAVANVITKWKHCPVRDIPAIEREELPMKPEDIDMNPEALTAWKRAKAAVYRRDKARKSRRILLEFMLEQANKFANHKAIWFPYNMDWRGRVYAVSMFNPQGNDMTKGLLTLAKGKPIGKEGYYWLKIHGANCAGVDKVPFPERIKFIEENHENIMACAKSPLENTWWAEQDLPFCFLAFCFEYAGVQHHGLSYNCSLPLAFDGSCSGIQHFSAMLRDEVGGRAVNLLPSETVQDIYGIVAKKVNEILQADAINGTDNEVVTVTDENTGEISEKVKLGTKALAGQWLAYGVTRSVTKRSVMTLAYGSKEFGFRQQVLEDTIQWAIDSGKGLMFTQPNQAAGYMAKLIWESVSVTVVAAVEAMNWLKSAAKLLAAEVKDKKTGEILRKRCAVHWVTPDGFPVWQEYKKPIQTRLNLMFLGQFRLQPTINTNKDSEIDAHKQESGIAPNFVHSQDGSHLRKTVVWAHEKYGIESFALIHDSFGTIPADAANLFKAVRETMVDTYESCDVLADFYDQFADQLHESQLDKMPALPAKGNLNLRDILESDFAFA

SEQ ID NO: 89 - DNA, 2670 bp, synthetic construct
  misc_feature 1..2670: note = Variant of RNA polymerase
  source 1..2670: mol_type = other DNA
atgcaccatcaccatcaccatatgaacacgattaacatcgctaagaacgacttctctgacatcgaactggctgctatcccgttcaacactctggctgaccattacggtgagcgtttagctcgcgaacagttggcccttgagcatgagtcttacgagatgggtgaagcacgcttccgcaagatgtttgagcgtcaacttaaagctggtgaggttgcggataacgctgccgccaagcctctcatcactaccctactccctaagatgattgcacgcatcaacgactggtttgaggaagtgaaagctaagcgcggcaagcgcccgacagccttccagttcctgcaagaaatcaagccggaagccgtagcgtacatcaccattaagaccactctggcttgcctaaccagtgcggaccgtacaaccgttcaggctgtagcaagcgcaatcggtcgggccattgaggacgaggctcgcttcggtcgtatccgtgaccttgaagctaagttgttcaagaaaaacgttgaggaacaactcaacaagcgcgtagggcacgtctacaagaaagcatttatgcaagttgtcgaggctgacatgctctctaagggtctactcggtggcgaggcgtggtcttcgtggcataaggaagactctcctcaagtaggagtacgctgcatcgagatgctcattgagtcaaccggaatggttagcttacaccgccaaaatgctggcgtagtaggtcaagactctgagactatcgaactcgcacctgaatacgctgaggctatcgcaacccgtgcaggtgcgctggctggcatctctccgatgttccaaccttgcgtagttcctcctaagccgtggactggcattactggtggtggctattgggctaacggtcgtcgtcctctggcgctggtgcgtactcacagtaagaaaggtctgatgcgctacgaagacgtttacatgcctgaggtgtacaaagcgattaacattgcgcaaaacaccgcctggtcgatcaacaagtgggtcctggcggtcgccaacgtaatcaccaagtggaagcattgtccggtccgggacatccctgcgattgagcgtgaagaactcccgatgaaaccggaagacatcgacatgaatcctgaggctctcaccgcgtggaaacgtgctaaagctgctgtgtaccgcagagacaaggctcgcaagtctcgccgtatcttgcttgagttcatgcttgagcaagccaataagtttgctaaccataaggccatctggttcccttacaacatggactggcgcggtcgtgtttacgctgtgtcaatgttcaacccgcaaggtaacgatatgaccaaaggactgcttacgctggcgaaaggtaaaccaatcggtaaggaaggttactactggctgaaaatccacggtgcaaactgtgcgggtgtcgataaggttccgttccctgagcgcatcaagttcattgaggaaaaccacgagaacatcatggcttgcgctaagtctccactggagaacacttggtgggctgagcaagatctcccgttctgcttccttgcgttctgctttgagtacgctggggtacagcaccacggcctgagctataactgctcccttccgctggcgtttgacgggtcttgctctggcatccagcacttctccgcgatgctccgagatgaggtaggtggtcgcgcggttaacttgcttcctagtgaaaccgttcaggacatctacgggattgttgctaagaaagtcaacgagattctacaagcagacgcaatcaatgggaccgataacgaagtagttaccgtgaccgatgagaacactggtgaaatctctgagaaagtcaagctgggcactaaggcactggctggtcaatggctggcttacggtgttactcgcagtgtgactaagcgttcagtcatgacgctggcttacgggtccaaagagttcggcttccgtcaacaagtgctggaagatactattcagtgggctattgattccggcaagggtctgatgttcactcagccgaatcaggctgctggatacatggctaagctgatttgggaatctgtgagcgtgacggtggtagctgcggttgaagcaatgaactggcttaagtctgctgctaagctgctggctgctgaggtcaaagataagaagactggagagattcttcgcaagcgttgcgctgtgcattgggtaactcctgatggtttccctgtgtggcaggaatacaagaagcctattcagacgcgcttgaacctgatgttcctcggtcagttccgcttacagcctaccattaacaccaacaaagatagcgagattgatgcacacaaacaggagtctggtatcgctcctaactttgtacacagccaagacggtagccaccttcgtaagactgtagtgtgggcacacgagaagtacggaatcgaatcttttgcactgattcacgactccttcggtaccattccggctgacgctgcgaacctgttcaaagcagtgcgcgaaactatggttgacacatatgagtcttgtgatgtactggctgatttctacgaccagttcgctgaccagttgcacgagtctcaattggacaaaatgccagcacttccggctaaaggtaacttgaacctccgtgacatcttagagtcggacttcgcgttcgcg

SEQ ID NO: 90 - protein, 890 aa, synthetic construct
  REGION 1..890: note = Variant of RNA polymerase
MHHHHHHMNTINIAKNDFSDIELAAIPFNTLADHYGERLAREQLALEHESYEMGEARFRKMFERQLKAGEVADNAAAKPLITTLLPKMIARINDWFEEVKAKRGKRPTAFQFLQEIKPEAVAYITIKTTLACLTSADRTTVQAVASAIGRAIEDEARFGRIRDLEAKLFKKNVEEQLNKRVGHVYKKAFMQVVEADMLSKGLLGGEAWSSWHKEDSPQVGVRCIEMLIESTGMVSLHRQNAGVVGQDSETIELAPEYAEAIATRAGALAGISPMFQPCVVPPKPWTGITGGGYWANGRRPLALVRTHSKKGLMRYEDVYMPEVYKAINIAQNTAWSINKWVLAVANVITKWKHCPVRDIPAIEREELPMKPEDIDMNPEALTAWKRAKAAVYRRDKARKSRRILLEFMLEQANKFANHKAIWFPYNMDWRGRVYAVSMFNPQGNDMTKGLLTLAKGKPIGKEGYYWLKIHGANCAGVDKVPFPERIKFIEENHENIMACAKSPLENTWWAEQDLPFCFLAFCFEYAGVQHHGLSYNCSLPLAFDGSCSGIQHFSAMLRDEVGGRAVNLLPSETVQDIYGIVAKKVNEILQADAINGTDNEVVTVTDENTGEISEKVKLGTKALAGQWLAYGVTRSVTKRSVMTLAYGSKEFGFRQQVLEDTIQWAIDSGKGLMFTQPNQAAGYMAKLIWESVSVTVVAAVEAMNWLKSAAKLLAAEVKDKKTGEILRKRCAVHWVTPDGFPVWQEYKKPIQTRLNLMFLGQFRLQPTINTNKDSEIDAHKQESGIAPNFVHSQDGSHLRKTVVWAHEKYGIESFALIHDSFGTIPADAANLFKAVRETMVDTYESCDVLADFYDQFADQLHESQLDKMPALPAKGNLNLRDILESDFAFA

SEQ ID NO: 91 - DNA, 2670 bp, synthetic construct
  misc_feature 1..2670: note = Variant of RNA polymerase
  source 1..2670: mol_type = other DNA
atgcaccatcaccatcaccatatgaacacgattaacatcgctaagaacgacttctctgacatcgaactggctgctatcccgttcaacactctggctgaccattacggtgagcgtttagctcgcgaacagttggcccttgagcatgagtcttacgagatgggtgaagcacgcttccgcaagatgtttgagcgtcaacttaaagctggtgaggttgcggataacgctgccgccaagcctctcatcactaccctactccctaagatgattgcacgcatcaacgactggtttgaggaagtgaaagctaagcgcggcaagcgcccgacagccttccagttcctgcaagaaatcaagccggaagccgtagcgtacatcaccattaagaccactctggcttgcctaaccagtgcggaccgtacaaccgttcaggctgtagcaagcgcaatcggtcgggccattgaggacgaggctcgcttcggtcgtatccgtgaccttgaagctaagtggttcaagaaaaacgttgaggaacaactcaacaagcgcgtagggcacgtctacaagaaagcatttatgcaagttgtcgaggctgacatgctctctaagggtctactcggtggcgaggcgtggtcttcgtggcataaggaagactctattcatgtaggagtacgctgcatcgagatgctcattgagtcaaccggaatggttagcttacaccgccaaaatgctggcgtagtaggtcaagactctgagactatcgaactcgcacctgaatacgctgaggctatcgcaacccgtgcaggtgcgctggctggcatctctccgatgttccaaccttgcgtagttcctcctaagccgtggactggcattactggtggtggctattgggctaacggtcgtcgtcctctggcgctggtgcgtactcacagtaagaaaggtctgatgcgctacgaagacgtttacatgcctgaggtgtacaaagcgattaacattgcgcaaaacaccgcctggtcgatcaacaagtgggtcctggcggtcgccaacgtaatcaccaagtggaagcattgtccggtccgggacatccctgcgattgagcgtgaagaactcccgatgaaaccggaagacatcgacatgaatcctgaggctctcaccgcgtggaaacgtgctaaagctgctgtgtaccgcagagacaaggctcgcaagtctcgccgtatcttgcttgagttcatgcttgagcaagccaataagtttgctaaccataaggccatctggttcccttacaacatggactggcgcggtcgtgtttacgctgtgtcaatgttcaacccgcaaggtaacgatatgaccaaaggactgcttacgctggcgaaaggtaaaccaatcggtaaggaaggttactactggctgaaaatccacggtgcaaactgtgcgggtgtcgataaggttccgttccctgagcgcatcaagttcattgaggaaaaccacgagaacatcatggcttgcgctaagtctccactggagaacacttggtgggctgagcaagatctcccgttctgcttccttgcgttctgctttgagtacgctggggtacagcaccacggcctgagctataactgctcccttccgctggcgtttgacgggtcttgctctggcatccagcacttctccgcgatgctccgagatgaggtaggtggtcgcgcggttaacttgcttcctagtgaaaccgttcaggacatctacgggattgttgctaagaaagtcaacgagattctacaagcagacgcaatcaatgggaccgataacgaagtagttaccgtgaccgatgagaacactggtgaaatctctgagaaagtcaagctgggcactaaggcactggctggtcaatggctggcttacggtgttactcgcagtgtgactaagcgttcagtcatgacgctggcttacgggtccaaagagttcggcttccgtcaacaagtgctggaagatactattcagtgggctattgattccggcaagggtctgatgttcactcagccgaatcaggctgctggatacatggctaagctgatttgggaatctgtgagcgtgacggtggtagctgcggttgaagcaatgaactggcttaagtctgctgctaagctgctggctgctgaggtcaaagataagaagactggagagattcttcgcaagcgttgcgctgtgcattgggtaactcctgatggtttccctgtgtggcaggaatacaagaagcctattcagacgcgcttgaacctgatgttcctcggtcagttccgcttacagcctaccattaacaccaacaaagatagcgagattgatgcacacaaacaggagtctggtatcgctcctaactttgtacacagccaagacggtagccaccttcgtaagactgtagtgtgggcacacgagaagtacggaatcgaatcttttgcactgattcacgactccttcggtaccattccggctgacgctgcgaacctgttcaaagcagtgcgcgaaactatggttgacacatatgagtcttgtgatgtactggctgatttctacgaccagttcgctgaccagttgcacgagtctcaattggacaaaatgccagcacttccggctaaaggtaacttgaacctccgtgacatcttagagtcggacttcgcgttcgcg

SEQ ID NO: 92 - protein, 890 aa, synthetic construct
  REGION 1..890: note = Variant of RNA polymerase
MHHHHHHMNTINIAKNDFSDIELAAIPFNTLADHYGERLAREQLALEHESYEMGEARFRKMFERQLKAGEVADNAAAKPLITTLLPKMIARINDWFEEVKAKRGKRPTAFQFLQEIKPEAVAYITIKTTLACLTSADRTTVQAVASAIGRAIEDEARFGRIRDLEAKWFKKNVEEQLNKRVGHVYKKAFMQVVEADMLSKGLLGGEAWSSWHKEDSIHVGVRCIEMLIESTGMVSLHRQNAGVVGQDSETIELAPEYAEAIATRAGALAGISPMFQPCVVPPKPWTGITGGGYWANGRRPLALVRTHSKKGLMRYEDVYMPEVYKAINIAQNTAWSINKWVLAVANVITKWKHCPVRDIPAIEREELPMKPEDIDMNPEALTAWKRAKAAVYRRDKARKSRRILLEFMLEQANKFANHKAIWFPYNMDWRGRVYAVSMFNPQGNDMTKGLLTLAKGKPIGKEGYYWLKIHGANCAGVDKVPFPERIKFIEENHENIMACAKSPLENTWWAEQDLPFCFLAFCFEYAGVQHHGLSYNCSLPLAFDGSCSGIQHFSAMLRDEVGGRAVNLLPSETVQDIYGIVAKKVNEILQADAINGTDNEVVTVTDENTGEISEKVKLGTKALAGQWLAYGVTRSVTKRSVMTLAYGSKEFGFRQQVLEDTIQWAIDSGKGLMFTQPNQAAGYMAKLIWESVSVTVVAAVEAMNWLKSAAKLLAAEVKDKKTGEILRKRCAVHWVTPDGFPVWQEYKKPIQTRLNLMFLGQFRLQPTINTNKDSEIDAHKQESGIAPNFVHSQDGSHLRKTVVWAHEKYGIESFALIHDSFGTIPADAANLFKAVRETMVDTYESCDVLADFYDQFADQLHESQLDKMPALPAKGNLNLRDILESDFAFA

SEQ ID NO: 93 - DNA, 2670 bp, synthetic construct
  misc_feature 1..2670: note = Variant of RNA polymerase
  source 1..2670: mol_type = other DNA
atgcaccatcaccatcaccatatgaacacgattaacatcgctaagaacgacttctctgacatcgaactggctgctatcccgttcaacactctggctgaccattacggtgagcgtttagctcgcgaacagttggcccttgagcatgagtcttacgagatgggtgaagcacgcttccgcaagatgtttgagcgtcaacttaaagctggtgaggttgcggataacgctgccgccaagcctctcatcactaccctactccctaagatgattgcacgcatcaacgactggtttgaggaagtgaaagctaagcgcggcaagcgcccgacagccttccagttcctgcaagaaatcaagccggaagccgtagcgtacatcaccattaagaccactctggcttgcctaaccagtgcggaccgtacaaccgttcaggctgtagcaagcgcaatcggtcgggccattgaggacgaggctcgcttcggtcgtatccgtgaccttgaagctaagcacttcaagaaaagggttgaggaacaactcaacaagcgcgtagggcacgtctacaagaaagcatttatgcaagttgtcgaggctgacatgctctctaagggtctactcggtggcgaggcgtggtcttcgtggcataaggaagactctattcatgtaggagtacgctgcatcgagatgctcattgagtcaaccggaatggttagcttacaccgccaaaatgctggcgtagtaggtcaagactctgagactatcgaactcgcacctgaatacgctgaggctatcgcaacccgtgcaggtgcgctggctggcatctctccgatgttccaaccttgcgtagttcctcctaagccgtggactggcattactggtggtggctattgggctaacggtcgtcgtcctctggcgctggtgcgtactcacagtaagaaaggtctgatgcgctacgaagacgtttacatgcctgaggtgtacaaagcgattaacattgcgcaaaacaccgcctggtcgatcaacaagtgggtcctggcggtcgccaacgtaatcaccaagtggaagcattgtccggtccgggacatccctgcgattgagcgtgaagaactcccgatgaaaccggaagacatcgacatgaatcctgaggctctcaccgcgtggaaacgtgctaaagctgctgtgtaccgcagagacaaggctcgcaagtctcgccgtatcttgcttgagttcatgcttgagcaagccaataagtttgctaaccataaggccatctggttcccttacaacatggactggcgcggtcgtgtttacgctgtgtcaatgttcaacccgcaaggtaacgatatgaccaaaggactgcttacgctggcgaaaggtaaaccaatcggtaaggaaggttactactggctgaaaatccacggtgcaaactgtgcgggtgtcgataaggttccgttccctgagcgcatcaagttcattgaggaaaaccacgagaacatcatggcttgcgctaagtctccactggagaacacttggtgggctgagcaagatctcccgttctgcttccttgcgttctgctttgagtacgctggggtacagcaccacggcctgagctataactgctcccttccgctggcgtttgacgggtcttgctctggcatccagcacttctccgcgatgctccgagatgaggtaggtggtcgcgcggttaacttgcttcctagtgaaaccgttcaggacatctacgggattgttgctaagaaagtcaacgagattctacaagcagacgcaatcaatgggaccgataacgaagtagttaccgtgaccgatgagaacactggtgaaatctctgagaaagtcaagctgggcactaaggcactggctggtcaatggctggcttacggtgttactcgcagtgtgactaagcgttcagtcatgacgctggcttacgggtccaaagagttcggcttccgtcaacaagtgctggaagatactattcagtgggctattgattccggcaagggtctgatgttcactcagccgaatcaggctgctggatacatggctaagctgatttgggaatctgtgagcgtgacggtggtagctgcggttgaagcaatgaactggcttaagtctgctgctaagctgctggctgctgaggtcaaagataagaagactggagagattcttcgcaagcgttgcgctgtgcattgggtaactcctgatggtttccctgtgtggcaggaatacaagaagcctattcagacgcgcttgaacctgatgttcctcggtcagttccgcttacagcctaccattaacaccaacaaagatagcgagattgatgcacacaaacaggagtctggtatcgctcctaactttgtacacagccaagacggtagccaccttcgtaagactgtagtgtgggcacacgagaagtacggaatcgaatcttttgcactgattcacgactccttcggtaccattccggctgacgctgcgaacctgttcaaagcagtgcgcgaaactatggttgacacatatgagtcttgtgatgtactggctgatttctacgaccagttcgctgaccagttgcacgagtctcaattggacaaaatgccagcacttccggctaaaggtaacttgaacctccgtgacatcttagagtcggacttcgcgttcgcg

SEQ ID NO: 94 - protein, 890 aa, synthetic construct
  REGION 1..890: note = Variant of RNA polymerase
MHHHHHHMNTINIAKNDFSDIELAAIPFNTLADHYGERLAREQLALEHESYEMGEARFRKMFERQLKAGEVADNAAAKPLITTLLPKMIARINDWFEEVKAKRGKRPTAFQFLQEIKPEAVAYITIKTTLACLTSADRTTVQAVASAIGRAIEDEARFGRIRDLEAKHFKKRVEEQLNKRVGHVYKKAFMQVVEADMLSKGLLGGEAWSSWHKEDSIHVGVRCIEMLIESTGMVSLHRQNAGVVGQDSETIELAPEYAEAIATRAGALAGISPMFQPCVVPPKPWTGITGGGYWANGRRPLALVRTHSKKGLMRYEDVYMPEVYKAINIAQNTAWSINKWVLAVANVITKWKHCPVRDIPAIEREELPMKPEDIDMNPEALTAWKRAKAAVYRRDKARKSRRILLEFMLEQANKFANHKAIWFPYNMDWRGRVYAVSMFNPQGNDMTKGLLTLAKGKPIGKEGYYWLKIHGANCAGVDKVPFPERIKFIEENHENIMACAKSPLENTWWAEQDLPFCFLAFCFEYAGVQHHGLSYNCSLPLAFDGSCSGIQHFSAMLRDEVGGRAVNLLPSETVQDIYGIVAKKVNEILQADAINGTDNEVVTVTDENTGEISEKVKLGTKALAGQWLAYGVTRSVTKRSVMTLAYGSKEFGFRQQVLEDTIQWAIDSGKGLMFTQPNQAAGYMAKLIWESVSVTVVAAVEAMNWLKSAAKLLAAEVKDKKTGEILRKRCAVHWVTPDGFPVWQEYKKPIQTRLNLMFLGQFRLQPTINTNKDSEIDAHKQESGIAPNFVHSQDGSHLRKTVVWAHEKYGIESFALIHDSFGTIPADAANLFKAVRETMVDTYESCDVLADFYDQFADQLHESQLDKMPALPAKGNLNLRDILESDFAFA

SEQ ID NO: 95 - DNA, 2670 bp, synthetic construct
  misc_feature 1..2670: note = Variant of RNA polymerase
  source 1..2670: mol_type = other DNA
atgcaccatcaccatcaccatatgaacacgattaacatcgctaagaacgacttctctgacatcgaactggctgctatcccgttcaacactctggctgaccattacggtgagcgtttagctcgcgaacagttggcccttgagcatgagtcttacgagatgggtgaagcacgcttccgcaagatgtttgagcgtcaacttaaagctggtgaggttgcggataacgctgccgccaagcctctcatcactaccctactccctaagatgattgcacgcatcaacgactggtttgaggaagtgaaagctaagcgcggcaagcgcccgacagccttccagttcctgcaagaaatcaagccggaagccgtagcgtacatcaccattaagaccactctggcttgcctaaccagtgcggaccgtacaaccgttcaggctgtagcaagcgcaatcggtcgggccattgaggacgaggctcgcttcggtcgtatccgtgaccttgaagataagcacttcaagaaaaacgttgaggaacaactcaacaagcgcgtagggcacgtctacaagaaagcatttatgcaagttgtcgaggctgacatgctctctaagggtctactcggtggcgaggcgtggtcttcgtggcataaggaagactctattcatgtaggagtacgctgcatcgagatgctcattgagtcaaccggaatggttagcttacaccgccaaaatgctggcgtagtaggtcaagactctgagactatcgaactcgcacctgaatacgctgaggctatcgcaacccgtgcaggtgcgctggctggcatctctccgatgttccaaccttgcgtagttcctcctaagccgtggactggcattactggtggtggctattgggctaacggtcgtcgtcctctggcgctggtgcgtactcacagtaagaaaggtctgatgcgctacgaagacgtttacatgcctgaggtgtacaaagcgattaacattgcgcaaaacaccgcctggtcgatcaacaagtgggtcctggcggtcgccaacgtaatcaccaagtggaagcattgtccggtccgggacatccctgcgattgagcgtgaagaactcccgatgaaaccggaagacatcgacatgaatcctgaggctctcaccgcgtggaaacgtgctaaagctgctgtgtaccgcagagacaaggctcgcaagtctcgccgtatcttgcttgagttcatgcttgagcaagccaataagtttgctaaccataaggccatctggttcccttacaacatggactggcgcggtcgtgtttacgctgtgtcaatgttcaacccgcaaggtaacgatatgaccaaaggactgcttacgctggcgaaaggtaaaccaatcggtaaggaaggttactactggctgaaaatccacggtgcaaactgtgcgggtgtcgataaggttccgttccctgagcgcatcaagttcattgaggaaaaccacgagaacatcatggcttgcgctaagtctccactggagaacacttggtgggctgagcaagatctcccgttctgcttccttgcgttctgctttgagtacgctggggtacagcaccacggcctgagctataactgctcccttccgctggcgtttgacgggtcttgctctggcatccagcacttctccgcgatgctccgagatgaggtaggtggtcgcgcggttaacttgcttcctagtgaaaccgttcaggacatctacgggattgttgctaagaaagtcaacgagattctacaagcagacgcaatcaatgggaccgataacgaagtagttaccgtgaccgatgagaacactggtgaaatctctgagaaagtcaagctgggcactaaggcactggctggtcaatggctggcttacggtgttactcgcagtgtgactaagcgttcagtcatgacgctggcttacgggtccaaagagttcggcttccgtcaacaagtgctggaagatactattcagtgggctattgattccggcaagggtctgatgttcactcagccgaatcaggctgctggatacatggctaagctgatttgggaatctgtgagcgtgacggtggtagctgcggttgaagcaatgaactggcttaagtctgctgctaagctgctggctgctgaggtcaaagataagaagactggagagattcttcgcaagcgttgcgctgtgcattgggtaactcctgatggtttccctgtgtggcaggaatacaagaagcctattcagacgcgcttgaacctgatgttcctcggtcagttccgcttacagcctaccattaacaccaacaaagatagcgagattgatgcacacaaacaggagtctggtatcgctcctaactttgtacacagccaagacggtagccaccttcgtaagactgtagtgtgggcacacgagaagtacggaatcgaatcttttgcactgattcacgactccttcggtaccattccggctgacgctgcgaacctgttcaaagcagtgcgcgaaactatggttgacacatatgagtcttgtgatgtactggctgatttctacgaccagttcgctgaccagttgcacgagtctcaattggacaaaatgccagcacttccggctaaaggtaacttgaacctccgtgacatcttagagtcggacttcgcgttcgcg

SEQ ID NO: 96 - protein, 890 aa, synthetic construct
  REGION 1..890: note = Variant of RNA polymerase
MHHHHHHMNTINIAKNDFSDIELAAIPFNTLADHYGERLAREQLALEHESYEMGEARFRKMFERQLKAGEVADNAAAKPLITTLLPKMIARINDWFEEVKAKRGKRPTAFQFLQEIKPEAVAYITIKTTLACLTSADRTTVQAVASAIGRAIEDEARFGRIRDLEDKHFKKNVEEQLNKRVGHVYKKAFMQVVEADMLSKGLLGGEAWSSWHKEDSIHVGVRCIEMLIESTGMVSLHRQNAGVVGQDSETIELAPEYAEAIATRAGALAGISPMFQPCVVPPKPWTGITGGGYWANGRRPLALVRTHSKKGLMRYEDVYMPEVYKAINIAQNTAWSINKWVLAVANVITKWKHCPVRDIPAIEREELPMKPEDIDMNPEALTAWKRAKAAVYRRDKARKSRRILLEFMLEQANKFANHKAIWFPYNMDWRGRVYAVSMFNPQGNDMTKGLLTLAKGKPIGKEGYYWLKIHGANCAGVDKVPFPERIKFIEENHENIMACAKSPLENTWWAEQDLPFCFLAFCFEYAGVQHHGLSYNCSLPLAFDGSCSGIQHFSAMLRDEVGGRAVNLLPSETVQDIYGIVAKKVNEILQADAINGTDNEVVTVTDENTGEISEKVKLGTKALAGQWLAYGVTRSVTKRSVMTLAYGSKEFGFRQQVLEDTIQWAIDSGKGLMFTQPNQAAGYMAKLIWESVSVTVVAAVEAMNWLKSAAKLLAAEVKDKKTGEILRKRCAVHWVTPDGFPVWQEYKKPIQTRLNLMFLGQFRLQPTINTNKDSEIDAHKQESGIAPNFVHSQDGSHLRKTVVWAHEKYGIESFALIHDSFGTIPADAANLFKAVRETMVDTYESCDVLADFYDQFADQLHESQLDKMPALPAKGNLNLRDILESDFAFA

SEQ ID NO: 97 - DNA, 2670 bp, synthetic construct
  misc_feature 1..2670: note = Variant of RNA polymerase
  source 1..2670: mol_type = other DNA
atgcaccatcaccatcaccatatgaacacgattaacatcgctaagaacgacttctctgacatcgaactggctgctatcccgttcaacactctggctgaccattacggtgagcgtttagctcgcgaacagttggcccttgagcatgagtcttacgagatgggtgaagcacgcttccgcaagatgtttgagcgtcaacttaaagctggtgaggttgcggataacgctgccgccaagcctctcatcactaccctactccctaagatgattgcacgcatcaacgactggtttgaggaagtgaaagctaagcgcggcaagcgcccgacagccttccagttcctgcaagaaatcaagccggaagccgtagcgtacatcaccattaagaccactctggcttgcctaaccagtgcggaccgtacaaccgttcaggctgtagcaagcgcaatcggtcgggccattgaggacgaggctcgcttcggtcgtatccgtgaccttgaagctaagcacttcaagcttaacgttgaggaacaactcaacaagcgcgtagggcacgtctacaagaaagcatttatgcaagttgtcgaggctgacatgctctctaagggtctactcggtggcgaggcgtggtcttcgtggcataaggaagactctattcatgtaggagtacgctgcatcgagatgctcattgagtcaaccggaatggttagcttacaccgccaaaatgctggcgtagtaggtcaagactctgagactatcgaactcgcacctgaatacgctgaggctatcgcaacccgtgcaggtgcgctggctggcatctctccgatgttccaaccttgcgtagttcctcctaagccgtggactggcattactggtggtggctattgggctaacggtcgtcgtcctctggcgctggtgcgtactcacagtaagaaaggtctgatgcgctacgaagacgtttacatgcctgaggtgtacaaagcgattaacattgcgcaaaacaccgcctggtcgatcaacaagtgggtcctggcggtcgccaacgtaatcaccaagtggaagcattgtccggtccgggacatccctgcgattgagcgtgaagaactcccgatgaaaccggaagacatcgacatgaatcctgaggctctcaccgcgtggaaacgtgctaaagctgctgtgtaccgcagagacaaggctcgcaagtctcgccgtatcttgcttgagttcatgcttgagcaagccaataagtttgctaaccataaggccatctggttcccttacaacatggactggcgcggtcgtgtttacgctgtgtcaatgttcaacccgcaaggtaacgatatgaccaaaggactgcttacgctggcgaaaggtaaaccaatcggtaaggaaggttactactggctgaaaatccacggtgcaaactgtgcgggtgtcgataaggttccgttccctgagcgcatcaagttcattgaggaaaaccacgagaacatcatggcttgcgctaagtctccactggagaacacttggtgggctgagcaagatctcccgttctgcttccttgcgttctgctttgagtacgctggggtacagcaccacggcctgagctataactgctcccttccgctggcgtttgacgggtcttgctctggcatccagcacttctccgcgatgctccgagatgaggtaggtggtcgcgcggttaacttgcttcctagtgaaaccgttcaggacatctacgggattgttgctaagaaagtcaacgagattctacaagcagacgcaatcaatgggaccgataacgaagtagttaccgtgaccgatgagaacactggtgaaatctctgagaaagtcaagctgggcactaaggcactggctggtcaatggctggcttacggtgttactcgcagtgtgactaagcgttcagtcatgacgctggcttacgggtccaaagagttcggcttccgtcaacaagtgctggaagatactattcagtgggctattgattccggcaagggtctgatgttcactcagccgaatcaggctgctggatacatggctaagctgatttgggaatctgtgagcgtgacggtggtagctgcggttgaagcaatgaactggcttaagtctgctgctaagctgctggctgctgaggtcaaagataagaagactggagagattcttcgcaagcgttgcgctgtgcattgggtaactcctgatggtttccctgtgtggcaggaatacaagaagcctattcagacgcgcttgaacctgatgttcctcggtcagttccgcttacagcctaccattaacaccaacaaagatagcgagattgatgcacacaaacaggagtctggtatcgctcctaactttgtacacagccaagacggtagccaccttcgtaagactgtagtgtgggcacacgagaagtacggaatcgaatcttttgcactgattcacgactccttcggtaccattccggctgacgctgcgaacctgttcaaagcagtgcgcgaaactatggttgacacatatgagtcttgtgatgtactggctgatttctacgaccagttcgctgaccagttgcacgagtctcaattggacaaaatgccagcacttccggctaaaggtaacttgaacctccgtgacatcttagagtcggacttcgcgttcgcg

SEQ ID NO: 98 - protein, 890 aa, synthetic construct
  REGION 1..890: note = Variant of RNA polymerase
MHHHHHHMNTINIAKNDFSDIELAAIPFNTLADHYGERLAREQLALEHESYEMGEARFRKMFERQLKAGEVADNAAAKPLITTLLPKMIARINDWFEEVKAKRGKRPTAFQFLQEIKPEAVAYITIKTTLACLTSADRTTVQAVASAIGRAIEDEARFGRIRDLEAKHFKLNVEEQLNKRVGHVYKKAFMQVVEADMLSKGLLGGEAWSSWHKEDSIHVGVRCIEMLIESTGMVSLHRQNAGVVGQDSETIELAPEYAEAIATRAGALAGISPMFQPCVVPPKPWTGITGGGYWANGRRPLALVRTHSKKGLMRYEDVYMPEVYKAINIAQNTAWSINKWVLAVANVITKWKHCPVRDIPAIEREELPMKPEDIDMNPEALTAWKRAKAAVYRRDKARKSRRILLEFMLEQANKFANHKAIWFPYNMDWRGRVYAVSMFNPQGNDMTKGLLTLAKGKPIGKEGYYWLKIHGANCAGVDKVPFPERIKFIEENHENIMACAKSPLENTWWAEQDLPFCFLAFCFEYAGVQHHGLSYNCSLPLAFDGSCSGIQHFSAMLRDEVGGRAVNLLPSETVQDIYGIVAKKVNEILQADAINGTDNEVVTVTDENTGEISEKVKLGTKALAGQWLAYGVTRSVTKRSVMTLAYGSKEFGFRQQVLEDTIQWAIDSGKGLMFTQPNQAAGYMAKLIWESVSVTVVAAVEAMNWLKSAAKLLAAEVKDKKTGEILRKRCAVHWVTPDGFPVWQEYKKPIQTRLNLMFLGQFRLQPTINTNKDSEIDAHKQESGIAPNFVHSQDGSHLRKTVVWAHEKYGIESFALIHDSFGTIPADAANLFKAVRETMVDTYESCDVLADFYDQFADQLHESQLDKMPALPAKGNLNLRDILESDFAFA

SEQ ID NO: 99 - DNA, 2670 bp, synthetic construct
  misc_feature 1..2670: note = Variant of RNA polymerase
  source 1..2670: mol_type = other DNA
atgcaccatcaccatcaccatatgaacacgattaacatcgctaagaacgacttctctgacatcgaactggctgctatcccgttcaacactctggctgaccattacggtgagcgtttagctcgcgaacagttggcccttgagcatgagtcttacgagatgggtgaagcacgcttccgcaagatgtttgagcgtcaacttaaagctggtgaggttgcggataacgctgccgccaagcctctcatcactaccctactccctaagatgattgcacgcatcaacgactggtttgaggaagtgaaagctaagcgcggcaagcgcccgacagccttccagttcctgcaagaaatcaagccggaagccgtagcgtacatcaccattaagaccactctggcttgcctaaccagtgcggaccgtacaaccgttcaggctgtagcaagcgcaatcggtcgggccattgaggacgaggctcgcttcggtcgtatccgtgaccttgaagctaagcacttcaagtataacgttgaggaacaactcaacaagcgcgtagggcacgtctacaagaaagcatttatgcaagttgtcgaggctgacatgctctctaagggtctactcggtggcgaggcgtggtcttcgtggcataaggaagactctattcatgtaggagtacgctgcatcgagatgctcattgagtcaaccggaatggttagcttacaccgccaaaatgctggcgtagtaggtcaagactctgagactatcgaactcgcacctgaatacgctgaggctatcgcaacccgtgcaggtgcgctggctggcatctctccgatgttccaaccttgcgtagttcctcctaagccgtggactggcattactggtggtggctattgggctaacggtcgtcgtcctctggcgctggtgcgtactcacagtaagaaaggtctgatgcgctacgaagacgtttacatgcctgaggtgtacaaagcgattaacattgcgcaaaacaccgcctggtcgatcaacaagtgggtcctggcggtcgccaacgtaatcaccaagtggaagcattgtccggtccgggacatccctgcgattgagcgtgaagaactcccgatgaaaccggaagacatcgacatgaatcccgaggctctcaccgcgtggaaacgtgctaaagctgctgtgtaccgcagagacaaggctcgcaagtctcgccgtatcttgcttgagttcatgcttgagcaagccaataagtttgctaaccataaggccatctggttcccttacaacatggactggcgcggtcgtgtttacgctgtgtcaatgttcaacccgcaaggtaacgatatgaccaaaggactgcttacgctggcgaaaggtaaaccaatcggtaaggaaggttactactggctgaaaatccacggtgcaaactgtgcgggtgtcgataaggttccgttccctgagcgcatcaagttcattgaggaaaaccacgagaacatcatggcttgcgctaagtctccactggagaacacttggtgggctgagcaagatctcccgttctgcttccttgcgttctgctttgagtacgctggggtacagaaccacggcctgagctataactgctcccttccgctggcgtttgacgggtcttgctctggcatccagcacttctccgcgatgctccgagatgaggtaggtggtcgcgcggttaacttgcttcctagtgaaaccgttcaggacatctacgggattgttgctaagaaagtcaacgagattctacaagcagacgcaatcaatgggaccgataacgaagtagttaccgtgaccgatgagaacactggtgaaatctctgagaaagtcaagctgggcactaaggcactggctggtcaatggctggcttacggtgttactcgcagtgtgactaagcgttcagtcatgacgctggcttacgggtccaaagagttcggcttccgtcaacaagtgctggaagatactattcagtgggctattgattccggcaagggtctgatgttcactcagccgaatcaggctgctggatacatggctaagctgatttgggaatctgtgagcgtgacggtggtagctgcggttgaagcaatgaactggcttaagtctgctgctaagctgctggctgctgaggtcaaagataagaagactggagagattcttcgcaagcgttgcgctgtgcattgggtaactcctgatggtttccctgtgtggcaggaatacaagaagcctattcagacgcgcttgaacctgatgttcctcggtcagttccgcttacagcctaccattaacaccaacaaagatagcgagattgatgcacacaaacaggagtctggtatcgctcctaactttgtacacagccaagacggtagccaccttcgtaagactgtagtgtgggcacacgagaagtacggaatcgaatcttttgcactgattcacgactccttcggtaccattccggctgacgctgcgaacctgttcaaagcagtgcgcgaaactatggttgacacatatgagtcttgtgatgtactggctgatttctacgaccagttcgccgaccagttgcacgagtctcaattggacaaaatgccagcacttccggctaaaggtaacttgaacctccgtgacatcttagagtcggacttcgcgttcgcg

SEQ ID NO: 100 - protein, 890 aa, synthetic construct
  REGION 1..890: note = Variant of RNA polymerase
MHHHHHHMNTINIAKNDFSDIELAAIPFNTLADHYGERLAREQLALEHESYEMGEARFRKMFERQLKAGEVADNAAAKPLITTLLPKMIARINDWFEEVKAKRGKRPTAFQFLQEIKPEAVAYITIKTTLACLTSADRTTVQAVASAIGRAIEDEARFGRIRDLEAKHFKYNVEEQLNKRVGHVYKKAFMQVVEADMLSKGLLGGEAWSSWHKEDSIHVGVRCIEMLIESTGMVSLHRQNAGVVGQDSETIELAPEYAEAIATRAGALAGISPMFQPCVVPPKPWTGITGGGYWANGRRPLALVRTHSKKGLMRYEDVYMPEVYKAINIAQNTAWSINKWVLAVANVITKWKHCPVRDIPAIEREELPMKPEDIDMNPEALTAWKRAKAAVYRRDKARKSRRILLEFMLEQANKFANHKAIWFPYNMDWRGRVYAVSMFNPQGNDMTKGLLTLAKGKPIGKEGYYWLKIHGANCAGVDKVPFPERIKFIEENHENIMACAKSPLENTWWAEQDLPFCFLAFCFEYAGVQNHGLSYNCSLPLAFDGSCSGIQHFSAMLRDEVGGRAVNLLPSETVQDIYGIVAKKVNEILQADAINGTDNEVVTVTDENTGEISEKVKLGTKALAGQWLAYGVTRSVTKRSVMTLAYGSKEFGFRQQVLEDTIQWAIDSGKGLMFTQPNQAAGYMAKLIWESVSVTVVAAVEAMNWLKSAAKLLAAEVKDKKTGEILRKRCAVHWVTPDGFPVWQEYKKPIQTRLNLMFLGQFRLQPTINTNKDSEIDAHKQESGIAPNFVHSQDGSHLRKTVVWAHEKYGIESFALIHDSFGTIPADAANLFKAVRETMVDTYESCDVLADFYDQFADQLHESQLDKMPALPAKGNLNLRDILESDFAFA

SEQ ID NO: 101 - DNA, 2670 bp, synthetic construct
  misc_feature 1..2670: note = Variant of RNA polymerase
  source 1..2670: mol_type = other DNA
atgcaccatcaccatcaccatatgaacacgattaacatcgctaagaacgacttctctgacatcgaactggctgctatcccgttcaacactctggctgaccattacggtgagcgtttagctcgcgaacagttggcccttgagcatgagtcttacgagatgggtgaagcacgcttccgcaagatgtttgagcgtcaacttaaagctggtgaggttgcggataacgctgccgccaagcctctcatcactaccctactccctaagatgattgcacgcatcaacgactggtttgaggaagtgaaagctaagcgcggcaagcgcccgacagccttccagttcctgcaagaaatcaagccggaagccgtagcgtacatcaccattaagaccactctggcttgcctaaccagtgcggaccgtacaaccgttcaggctgtagcaagcgcaatcggtcgggccattgaggacgaggctcgcttcggtcgtatccgtgaccttgaagctaagcacttcaagaaagcggttgaggaacaactcaacaagcgcgtagggcacgtctacaagaaagcatttatgcaagttgtcgaggctgacatgctctctaagggtctactcggtggcgaggcgtggtcttcgtggcataaggaagactctattcatgtaggagtacgctgcatcgagatgctcattgagtcaaccggaatggttagcttacaccgccaaaatgctggcgtagtaggtcaagactctgagactatcgaactcgcacctgaatacgctgaggctatcgcaacccgtgcaggtgcgctggctggcatctctccgatgttccaaccttgcgtagttcctcctaagccgtggactggcattactggtggtggctattgggctaacggtcgtcgtcctctggcgctggtgcgtactcacagtaagaaaggtctgatgcgctacgaagacgtttacatgcctgaggtgtacaaagcgattaacattgcgcaaaacaccgcctggtcgatcaacaagtgggtcctggcggtcgccaacgtaatcaccaagtggaagcattgtccggtccgggacatccctgcgattgagcgtgaagaactcccgatgaaaccggaagacatcgacatgaatcctgaggctctcaccgcgtggaaacgtgctaaagctgctgtgtaccgcagagacaaggctcgcaagtctcgccgtatcttgcttgagttcatgcttgagcaagccaataagtttgctaaccataaggccatctggttcccttacaacatggactggcgcggtcgtgtttacgctgtgtcaatgttcaacccgcaaggtaacgatatgaccaaaggactgcttacgctggcgaaaggtaaaccaatcggtaaggaaggttactactggctgaaaatccacggtgcaaactgtgcgggtgtcgataaggttccgttccctgagcgcatcaagttcattgaggaaaaccacgagaacatcatggcttgcgctaagtctccactggagaacacttggtgggctgagcaagatctcccgttctgcttccttgcgttctgctttgagtacgctggggtacagcaccacggcctgagctataactgctcccttccgctggcgtttgacgggtcttgctctggcatccagcacttctccgcgatgctccgagatgaggtaggtggtcgcgcggttaacttgcttcctagtgaaaccgttcaggacatctacgggattgttgctaagaaagtcaacgagattctacaagcagacgcaatcaatgggaccgataacgaagtagttaccgtgaccgatgagaacactggtgaaatctctgagaaagtcaagctgggcactaaggcactggctggtcaatggctggcttacggtgttactcgcagtgtgactaagcgttcagtcatgacgctggcttacgggtccaaagagttcggcttccgtcaacaagtgctggaagatactattcagtgggctattgattccggcaagggtctgatgttcactcagccgaatcaggctgctggatacatggctaagctgatttgggaatctgtgagcgtgacggtggtagctgcggttgaagcaatgaactggcttaagtctgctgctaagctgctggctgctgaggtcaaagataagaagactggagagattcttcgcaagcgttgcgctgtgcattgggtaactcctgatggtttccctgtgtggcaggaatacaagaagcctattcagacgcgcttgaacctgatgttcctcggtcagttccgcttacagcctaccattaacaccaacaaagatagcgagattgatgcacacaaacaggagtctggtatcgctcctaactttgtacacagccaagacggtagccaccttcgtaagactgtagtgtgggcacacgagaagtacggaatcgaatcttttgcactgattcacgactccttcggtaccattccggctgacgctgcgaacctgttcaaagcagtgcgcgaaactatggttgacacatatgagtcttgtgatgtactggctgatttctacgaccagttcgctgaccagttgcacgagtctcaattggacaaaatgccagcacttccggctaaaggtaacttgaacctccgtgacatcttagagtcggacttcgcgttcgcg

SEQ ID NO: 102 - protein, 890 aa, synthetic construct
  REGION 1..890: note = Variant of RNA polymerase
MHHHHHHMNTINIAKNDFSDIELAAIPFNTLADHYGERLAREQLALEHESYEMGEARFRKMFERQLKAGEVADNAAAKPLITTLLPKMIARINDWFEEVKAKRGKRPTAFQFLQEIKPEAVAYITIKTTLACLTSADRTTVQAVASAIGRAIEDEARFGRIRDLEAKHFKKAVEEQLNKRVGHVYKKAFMQVVEADMLSKGLLGGEAWSSWHKEDSIHVGVRCIEMLIESTGMVSLHRQNAGVVGQDSETIELAPEYAEAIATRAGALAGISPMFQPCVVPPKPWTGITGGGYWANGRRPLALVRTHSKKGLMRYEDVYMPEVYKAINIAQNTAWSINKWVLAVANVITKWKHCPVRDIPAIEREELPMKPEDIDMNPEALTAWKRAKAAVYRRDKARKSRRILLEFMLEQANKFANHKAIWFPYNMDWRGRVYAVSMFNPQGNDMTKGLLTLAKGKPIGKEGYYWLKIHGANCAGVDKVPFPERIKFIEENHENIMACAKSPLENTWWAEQDLPFCFLAFCFEYAGVQHHGLSYNCSLPLAFDGSCSGIQHFSAMLRDEVGGRAVNLLPSETVQDIYGIVAKKVNEILQADAINGTDNEVVTVTDENTGEISEKVKLGTKALAGQWLAYGVTRSVTKRSVMTLAYGSKEFGFRQQVLEDTIQWAIDSGKGLMFTQPNQAAGYMAKLIWESVSVTVVAAVEAMNWLKSAAKLLAAEVKDKKTGEILRKRCAVHWVTPDGFPVWQEYKKPIQTRLNLMFLGQFRLQPTINTNKDSEIDAHKQESGIAPNFVHSQDGSHLRKTVVWAHEKYGIESFALIHDSFGTIPADAANLFKAVRETMVDTYESCDVLADFYDQFADQLHESQLDKMPALPAKGNLNLRDILESDFAFA

SEQ ID NO: 103 - DNA, 2670 bp, synthetic construct
  misc_feature 1..2670: note = Variant of RNA polymerase
  source 1..2670: mol_type = other DNA
atgcaccatcaccatcaccatatgaacacgattaacatcgctaagaacgacttctctgacatcgaactggctgctatcccgttcaacactctggctgaccattacggtgagcgtttagctcgcgaacagttggcccttgagcatgagtcttacgagatgggtgaagcacgcttccgcaagatgtttgagcgtcaacttaaagctggtgaggttgcggataacgctgccgccaagcctctcatcactaccctactccctaagatgattgcacgcatcaacgactggtttgaggaagtgaaagctaagcgcggcaagcgcccgacagccttccagttcctgcaagaaatcaagccggaagccgtagcgtacatcaccattaagaccactctggcttgcctaaccagtgcggaccgtacaaccgttcaggctgtagcaagcgcaatcggtcgggccattgaggacgaggctcgcttcggtcgtatccgtgaccttgaagctaagcacttcaagaaaaaccatgaggaacaactcaacaagcgcgtagggcacgtctacaagaaagcatttatgcaagttgtcgaggctgacatgctctctaagggtctactcggtggcgaggcgtggtcttcgtggcataaggaagactctattcatgtaggagtacgctgcatcgagatgctcattgagtcaaccggaatggttagcttacaccgccaaaatgctggcgtagtaggtcaagactctgagactatcgaactcgcacctgaatacgctgaggctatcgcaacccgtgcaggtgcgctggctggcatctctccgatgttccaaccttgcgtagttcctcctaagccgtggactggcattactggtggtggctattgggctaacggtcgtcgtcctctggcgctggtgcgtactcacagtaagaaaggtctgatgcgctacgaagacgtttacatgcctgaggtgtacaaagcgattaacattgcgcaaaacaccgcctggtcgatcaacaagtgggtcctggcggtcgccaacgtaatcaccaagtggaagcattgtccggtccgggacatccctgcgattgagcgtgaagaactcccgatgaaaccggaagacatcgacatgaatcctgaggctctcaccgcgtggaaacgtgctaaagctgctgtgtaccgcagagacaaggctcgcaagtctcgccgtatcttgcttgagttcatgcttgagcaagccaataagtttgctaaccataaggccatctggttcccttacaacatggactggcgcggtcgtgtttacgctgtgtcaatgttcaacccgcaaggtaacgatatgaccaaaggactgcttacgctggcgaaaggtaaaccaatcggtaaggaaggttactactggctgaaaatccacggtgcaaactgtgcgggtgtcgataaggttccgttccctgagcgcatcaagttcattgaggaaaaccacgagaacatcatggcttgcgctaagtctccactggagaacacttggtgggctgagcaagatctcccgttctgcttccttgcgttctgctttgagtacgctggggtacagcaccacggcctgagctataactgctcccttccgctggcgtttgacgggtcttgctctggcatccagcacttctccgcgatgctccgagatgaggtaggtggtcgcgcggttaacttgcttcctagtgaaaccgttcaggacatctacgggattgttgctaagaaagtcaacgagattctacaagcagacgcaatcaatgggaccgataacgaagtagttaccgtgaccgatgagaacactggtgaaatctctgagaaagtcaagctgggcactaaggcactggctggtcaatggctggcttacggtgttactcgcagtgtgactaagcgttcagtcatgacgctggcttacgggtccaaagagttcggcttccgtcaacaagtgctggaagatactattcagtgggctattgattccggcaagggtctgatgttcactcagccgaatcaggctgctggatacatggctaagctgatttgggaatctgtgagcgtgacggtggtagctgcggttgaagcaatgaactggcttaagtctgctgctaagctgctggctgctgaggtcaaagataagaagactggagagattcttcgcaagcgttgcgctgtgcattgggtaactcctgatggtttccctgtgtggcaggaatacaagaagcctattcagacgcgcttgaacctgatgttcctcggtcagttccgcttacagcctaccattaacaccaacaaagatagcgagattgatgcacacaaacaggagtctggtatcgctcctaactttgtacacagccaagacggtagccaccttcgtaagactgtagtgtgggcacacgagaagtacggaatcgaatcttttgcactgattcacgactccttcggtaccattccggctgacgctgcgaacctgttcaaagcagtgcgcgaaactatggttgacacatatgagtcttgtgatgtactggctgatttctacgaccagttcgctgaccagttgcacgagtctcaattggacaaaatgccagcacttccggctaaaggtaacttgaacctccgtgacatcttagagtcggacttcgcgttcgcg

SEQ ID NO: 104 - protein, 890 aa, synthetic construct
  REGION 1..890: note = Variant of RNA polymerase
MHHHHHHMNTINIAKNDFSDIELAAIPFNTLADHYGERLAREQLALEHESYEMGEARFRKMFERQLKAGEVADNAAAKPLITTLLPKMIARINDWFEEVKAKRGKRPTAFQFLQEIKPEAVAYITIKTTLACLTSADRTTVQAVASAIGRAIEDEARFGRIRDLEAKHFKKNHEEQLNKRVGHVYKKAFMQVVEADMLSKGLLGGEAWSSWHKEDSIHVGVRCIEMLIESTGMVSLHRQNAGVVGQDSETIELAPEYAEAIATRAGALAGISPMFQPCVVPPKPWTGITGGGYWANGRRPLALVRTHSKKGLMRYEDVYMPEVYKAINIAQNTAWSINKWVLAVANVITKWKHCPVRDIPAIEREELPMKPEDIDMNPEALTAWKRAKAAVYRRDKARKSRRILLEFMLEQANKFANHKAIWFPYNMDWRGRVYAVSMFNPQGNDMTKGLLTLAKGKPIGKEGYYWLKIHGANCAGVDKVPFPERIKFIEENHENIMACAKSPLENTWWAEQDLPFCFLAFCFEYAGVQHHGLSYNCSLPLAFDGSCSGIQHFSAMLRDEVGGRAVNLLPSETVQDIYGIVAKKVNEILQADAINGTDNEVVTVTDENTGEISEKVKLGTKALAGQWLAYGVTRSVTKRSVMTLAYGSKEFGFRQQVLEDTIQWAIDSGKGLMFTQPNQAAGYMAKLIWESVSVTVVAAVEAMNWLKSAAKLLAAEVKDKKTGEILRKRCAVHWVTPDGFPVWQEYKKPIQTRLNLMFLGQFRLQPTINTNKDSEIDAHKQESGIAPNFVHSQDGSHLRKTVVWAHEKYGIESFALIHDSFGTIPADAANLFKAVRETMVDTYESCDVLADFYDQFADQLHESQLDKMPALPAKGNLNLRDILESDFAFA

SEQ ID NO: 105 - DNA, 2670 bp, synthetic construct
  misc_feature 1..2670: note = Variant of RNA polymerase
  source 1..2670: mol_type = other DNA
atgcaccatcaccatcaccatatgaacacgattaacatcgctaagaacgacttctctgacatcgaactggctgctatcccgttcaacactctggctgaccattacggtgagcgtttagctcgcgaacagttggcccttgagcatgagtcttacgagatgggtgaagcacgcttccgcaagatgtttgagcgtcaacttaaagctggtgaggttgcggataacgctgccgccaagcctctcatcactaccctactccctaagatgattgcacgcatcaacgactggtttgaggaagtgaaagctaagcgcggcaagcgcccgacagccttccagttcctgcaagaaatcaagccggaagccgtagcgtacatcaccattaagaccactctggcttgcctaaccagtgcggaccgtacaaccgttcaggctgtagcaagcgcaatcggtcgggccattgaggacgaggctcgcttcggtcgtatccgtgaccttgaagctaagcacttcaagaaaaacgttgaggaacaactcaacaagcgcgtagggcacgtctacaagaaagcatttatgcaagttgtcgaggctgacatgctctctaagggtctactcggtggcgaggcgtggtcttcgtggcataaggaagactctattcatgtaggagtacgctgcatcgagatgctcattgagtcaaccggaatggttagcttacaccgccaaaatgctggcgtagtaggtcaagactctgagactatcgaactcgcacctgaatacgctgaggctatcgcaacccgtgcaggtgcgctggctggcatctctccgatgttccaaccttgcgtagttcctcctaagccgtggactggcattactggtggtggctattgggctaacggtcgtcgtcctctggcgctggtgcgtactcacagtaagaaaggtctgatgcgctacgaagacgtttacatgcctgaggtgtacaaagcgattaacattgcgcaaaacaccgcctggtcgatcaacaagtgggtcctggcggtcgccaacgtaatcaccaagtggaagcattgtccggtccgggacatccctgcgattgagcgtgaagaactcccgatgaaaccggaagacatcgacatgaatcctgaggctctccgggcgtggaaacgtgctaaagctgctgtgtaccgcagagacaaggctcgcaagtctcgccgtatcttgcttgagttcatgcttgagcaagccaataagtttgctaaccataaggccatctggttcccttacaacatggactggcgcggtcgtgtttacgctgtgtcaatgttcaacccgcaaggtaacgatatgaccaaaggactgcttacgctggcgaaaggtaaaccaatcggtaaggaaggttactactggctgaaaatccacggtgcaaactgtgcgggtgtcgataaggttccgttccctgagcgcatcaagttcattgaggaaaaccacgagaacatcatggcttgcgctaagtctccactggagaacacttggtgggctgagcaagatctcccgttctgcttccttgcgttctgctttgagtacgctggggtacagcaccacggcctgagctataactgctcccttccgctggcgtttgacgggtcttgctctggcatccagcacttctccgcgatgctccgagatgaggtaggtggtcgcgcggttaacttgcttcctagtgaaaccgttcaggacatctacgggattgttgctaagaaagtcaacgagattctacaagcagacgcaatcaatgggaccgataacgaagtagttaccgtgaccgatgagaacactggtgaaatctctgagaaagtcaagctgggcactaaggcactggctggtcaatggctggcttacggtgttactcgcagtgtgactaagcgttcagtcatgacgctggcttacgggtccaaagagttcggcttccgtcaacaagtgctggaagatactattcagtgggctattgattccggcaagggtctgatgttcactcagccgaatcaggctgctggatacatggctaagctgatttgggaatctgtgagcgtgacggtggtagctgcggttgaagcaatgaactggcttaagtctgctgctaagctgctggctgctgaggtcaaagataagaagactggagagattcttcgcaagcgttgcgctgtgcattgggtaactcctgatggtttccctgtgtggcaggaatacaagaagcctattcagacgcgcttgaacctgatgttcctcggtcagttccgcttacagcctaccattaacaccaacaaagatagcgagattgatgcacacaaacaggagtctggtatcgctcctaactttgtacacagccaagacggtagccaccttcgtaagactgtagtgtgggcacacgagaagtacggaatcgaatcttttgcactgattcacgactccttcggtaccattccggctgacgctgcgaacctgttcaaagcagtgcgcgaaactatggttgacacatatgagtcttgtgatgtactggctgatttctacgaccagttcgctgaccagttgcacgagtctcaattggacaaaatgccagcacttccggctaaaggtaacttgaacctccgtgacatcttagagtcggacttcgcgttcgcg

SEQ ID NO: 106 - protein, 890 aa, synthetic construct
  REGION 1..890: note = Variant of RNA polymerase
MHHHHHHMNTINIAKNDFSDIELAAIPFNTLADHYGERLAREQLALEHESYEMGEARFRKMFERQLKAGEVADNAAAKPLITTLLPKMIARINDWFEEVKAKRGKRPTAFQFLQEIKPEAVAYITIKTTLACLTSADRTTVQAVASAIGRAIEDEARFGRIRDLEAKHFKKNVEEQLNKRVGHVYKKAFMQVVEADMLSKGLLGGEAWSSWHKEDSIHVGVRCIEMLIESTGMVSLHRQNAGVVGQDSETIELAPEYAEAIATRAGALAGISPMFQPCVVPPKPWTGITGGGYWANGRRPLALVRTHSKKGLMRYEDVYMPEVYKAINIAQNTAWSINKWVLAVANVITKWKHCPVRDIPAIEREELPMKPEDIDMNPEALRAWKRAKAAVYRRDKARKSRRILLEFMLEQANKFANHKAIWFPYNMDWRGRVYAVSMFNPQGNDMTKGLLTLAKGKPIGKEGYYWLKIHGANCAGVDKVPFPERIKFIEENHENIMACAKSPLENTWWAEQDLPFCFLAFCFEYAGVQHHGLSYNCSLPLAFDGSCSGIQHFSAMLRDEVGGRAVNLLPSETVQDIYGIVAKKVNEILQADAINGTDNEVVTVTDENTGEISEKVKLGTKALAGQWLAYGVTRSVTKRSVMTLAYGSKEFGFRQQVLEDTIQWAIDSGKGLMFTQPNQAAGYMAKLIWESVSVTVVAAVEAMNWLKSAAKLLAAEVKDKKTGEILRKRCAVHWVTPDGFPVWQEYKKPIQTRLNLMFLGQFRLQPTINTNKDSEIDAHKQESGIAPNFVHSQDGSHLRKTVVWAHEKYGIESFALIHDSFGTIPADAANLFKAVRETMVDTYESCDVLADFYDQFADQLHESQLDKMPALPAKGNLNLRDILESDFAFA

SEQ ID NO: 107 - DNA, 2670 bp, synthetic construct
  misc_feature 1..2670: note = Variant of RNA polymerase
  source 1..2670: mol_type = other DNA
atgcaccatcaccatcaccatatgaacacgattaacatcgctaagaacgacttctctgacatcgaactggctgctatcccgttcaacactctggctgaccattacggtgagcgtttagctcgcgaacagttggcccttgagcatgagtcttacgagatgggtgaagcacgcttccgcaagatgtttgagcgtcaacttaaagctggtgaggttgcggataacgctgccgccaagcctctcatcactaccctactccctaagatgattgcacgcatcaacgactggtttgaggaagtgaaagctaagcgcggcaagcgcccgacagccttccagttcctgcaagaaatcaagccggaagccgtagcgtacatcaccattaagaccactctggcttgcctaaccagtgcggaccgtacaaccgttcaggctgtagcaagcgcaatcggtcgggccattgaggacgaggctcgcttcggtcgtatccgtgaccttgaagctaagcacttcaagaaaaacgttgaggaacaactcaacaagcgcgtagggcacgtctacaagaaagcatttatgcaagttgtcgaggctgacatgctctctaagggtctactcggtggcgaggcgtggtcttcgtggcataaggaagactctattcatgtaggagtacgctgcatcgagatgctcattgagtcaaccggaatggttagcttacaccgccaaaatgctggcgtagtaggtcaagactctgagactatcgaactcgcacctgaatacgctgaggctatcgcaacccgtgcaggtgcgctggctggcatctctccgatgttccaaccttgcgtagttcctcctaagccgtggactggcattactggtggtggctattgggctaacggtcgtcgtcctctggcgctggtgcgtactcacagtaagaaaggtctgatgcgctacgaagacgtttacatgcctgaggtgtacaaagcgattaacattgcgcaaaacaccgcctggtcgatcaacaagtgggtcctggcggtcgccaacgtaatcaccaagtggaagcattgtccggtccgggacatccctgcgattgagcgtgaagaactcccgatgaaaccggaagacatcgacatgaatcctgaggctctcaccgcgtggaaacgtgctaaagctgctgtgtaccgcagagacaaggctcgcaagtctcgccgtatcttgcttgagttcatgcttgagcaagccaataagtttgctaaccataaggccatctggttcccttacaacatggactggcgcggtcgtgtttacgctgtgtcaatgttcaacccgcaaggtaacgatatgaccaaaggactgcttacgctggcgaaaggtaaaccaatcggtaaggaaggttactactggctgaaaatccacggtgcaaactgtgcgggtgtcgataaggttccgttccctgagcgcatcaagttcattgaggaaaaccacgagaacatcatggcttgcgctaagtctccactggagaacacttggtgggctgagcaagatctcccgttctgcttccttgcgttctgctttgagtacgctggggtacagcaccacggcctgagctataactgctcccttccgctggcgtttgacgggtcttgctctggcatccagcacttctccgcgatgctccgagatgaggtaggtggtcgcgcggttaacttgcttcctagtgaaaccgttcaggacatctacgggattgttgctaagaaagtcaacgagattctacaagcagacgcaatcaatgggaccgataacgaagtagttaccgtgaccgatgagaacactggtgaaatctctgagaaagtcaagctgggcactaaggcactggctggtcaatggctggcttacggtgttactcgcagtgtgactaagcgttcagtcatgacgctggcttacgggtccaaagagttcggcttccgtcaacaagtgctggaagatactattcagtgggctattgattccggcaagggtctgatgttcactcagccgaatcaggctgctggatacatggctaagctgatttgggaatctgtgagcgtgacggtggtagctgcggttgaagcaatgaactggcttaagtctgctgctaagctgctggctgctgaggtcaaagataagaagactggagagattcttcgcaagcgttgcgctgtgcattgggtaactcctgatggtttccctgtgtggcaggaatacaagaagcctattcagacgcgcttgaacctgatgttcctcggtcagttccgcttacagcctaccattaacaccaacaaagctagcgagattgatgcacacaaacaggagtctggtatcgctcctaactttgtacacagccaagacggtagccaccttcgtaagactgtagtgtgggcacacgagaagtacggaatcgaatcttttgcactgattcacgactccttcggtaccattccggctgacgctgcgaacctgttcaaagcagtgcgcgaaactatggttgacacatatgagtcttgtgatgtactggctgatttctacgaccagttcgctgaccagttgcacgagtctcaattggacaaaatgccagcacttccggctaaaggtaacttgaacctccgtgacatcttagagtcggacttcgcgttcgcg

SEQ ID NO: 108 - protein, 890 aa, synthetic construct
  REGION 1..890: note = Variant of RNA polymerase
MHHHHHHMNTINIAKNDFSDIELAAIPFNTLADHYGERLAREQLALEHESYEMGEARFRKMFERQLKAGEVADNAAAKPLITTLLPKMIARINDWFEEVKAKRGKRPTAFQFLQEIKPEAVAYITIKTTLACLTSADRTTVQAVASAIGRAIEDEARFGRIRDLEAKHFKKNVEEQLNKRVGHVYKKAFMQVVEADMLSKGLLGGEAWSSWHKEDSIHVGVRCIEMLIESTGMVSLHRQNAGVVGQDSETIELAPEYAEAIATRAGALAGISPMFQPCVVPPKPWTGITGGGYWANGRRPLALVRTHSKKGLMRYEDVYMPEVYKAINIAQNTAWSINKWVLAVANVITKWKHCPVRDIPAIEREELPMKPEDIDMNPEALTAWKRAKAAVYRRDKARKSRRILLEFMLEQANKFANHKAIWFPYNMDWRGRVYAVSMFNPQGNDMTKGLLTLAKGKPIGKEGYYWLKIHGANCAGVDKVPFPERIKFIEENHENIMACAKSPLENTWWAEQDLPFCFLAFCFEYAGVQHHGLSYNCSLPLAFDGSCSGIQHFSAMLRDEVGGRAVNLLPSETVQDIYGIVAKKVNEILQADAINGTDNEVVTVTDENTGEISEKVKLGTKALAGQWLAYGVTRSVTKRSVMTLAYGSKEFGFRQQVLEDTIQWAIDSGKGLMFTQPNQAAGYMAKLIWESVSVTVVAAVEAMNWLKSAAKLLAAEVKDKKTGEILRKRCAVHWVTPDGFPVWQEYKKPIQTRLNLMFLGQFRLQPTINTNKASEIDAHKQESGIAPNFVHSQDGSHLRKTVVWAHEKYGIESFALIHDSFGTIPADAANLFKAVRETMVDTYESCDVLADFYDQFADQLHESQLDKMPALPAKGNLNLRDILESDFAFA

SEQ ID NO: 109 - DNA, 2670 bp, synthetic construct
  misc_feature 1..2670: note = Variant of RNA polymerase
  source 1..2670: mol_type = other DNA
atgcaccatcaccatcaccatatgaacacgattaacatcgctaagaacgacttctctgacatcgaactggctgctatcccgttcaacactctggctgaccattacggtgagcgtttagctcgcgaacagttggcccttgagcatgagtcttacgagatgggtgaagcacgcttccgcaagatgtttgagcgtcaacttaaagctggtgaggttgcggataacgctgccgccaagcctctcatcactaccctactccctaagatgattgcacgcatcaacgactggtttgaggaagtgaaagctaagcgcggcaagcgcccgacagccttccagttcctgcaagaaatcaagccggaagccgtagcgtacatcaccattaagaccactctggcttgcctaaccagtgcggaccgtacaaccgttcaggctgtagcaagcgcaatcggtcgggccattgaggacgaggctcgcttcggtcgtatccgtgaccttgaagctaagcggttcaagaaaaacgttgaggaacaactcaacaagcgcgtagggcacgtctacaagaaagcatttatgcaagttgtcgaggctgacatgctctctaagggtctactcggtggcgaggcgtggtcttcgtggcataaggaagactctattcatgtaggagtacgctgcatcgagatgctcattgagtcaaccggaatggttagcttacaccgccaaaatgctggcgtagtaggtcaagactctgagactatcgaactcgcacctgaatacgctgaggctatcgcaacccgtgcaggtgcgctggctggcatctctccgatgttccaaccttgcgtagttcctcctaagccgtggactggcattactggtggtggctattgggctaacggtcgtcgtcctctggcgctggtgcgtactcacagtaagaaaggtctgatgcgctacgaagacgtttacatgcctgaggtgtacaaagcgattaacattgcgcaaaacaccgcctggtcgatcaacaagtgggtcctggcggtcgccaacgtaatcaccaagtggaagcattgtccggtccgggacatccctgcgattgagcgtgaagaactcccgatgaaaccggaagacatcgacatgaatcctgaggctctcaccgcgtggaaacgtgctaaagctgctgtgtaccgcagagacaaggctcgcaagtctcgccgtatcttgcttgagttcatgcttgagcaagccaataagtttgctaaccataaggccatctggttcccttacaacatggactggcgcggtcgtgtttacgctgtgtcaatgttcaacccgcaaggtaacgatatgaccaaaggactgcttacgctggcgaaaggtaaaccaatcggtaaggaaggttactactggctgaaaatccacggtgcaaactgtgcgggtgtcgataaggttccgttccctgagcgcatcaagttcattgaggaaaaccacgagaacatcatggcttgcgctaagtctccactggagaacacttggtgggctgagcaagatctcccgttctgcttccttgcgttctgctttgagtacgctggggtacagcaccacggcctgagctataactgctcccttccgctggcgtttgacgggtcttgctctggcatccagcacttctccgcgatgctccgagatgaggtaggtggtcgcgcggttaacttgcttcctagtgaaaccgttcaggacatctacgggattgttgctaagaaagtcaacgagattctacaagcagacgcaatcaatgggaccgataacgaagtagttaccgtgaccgatgagaacactggtgaaatctctgagaaagtcaagctgggcactaaggcactggctggtcaatggctggcttacggtgttactcgcagtgtgactaagcgttcagtcatgacgctggcttacgggtccaaagagttcggcttccgtcaacaagtgctggaagatactattcagtgggctattgattccggcaagggtctgatgttcactcagccgaatcaggctgctggatacatggctaagctgatttgggaatctgtgagcgtgacggtggtagctgcggttgaagcaatgaactggcttaagtctgctgctaagctgctggctgctgaggtcaaagataagaagactggagagattcttcgcaagcgttgcgctgtgcattgggtaactcctgatggtttccctgtgtggcaggaatacaagaagcctattcagacgcgcttgaacctgatgttcctcggtcagttccgcttacagcctaccattaacaccaacaaagatagcgagattgatgcacacaaacaggagtctggtatcgctcctaactttgtacacagccaagacggtagccaccttcgtaagactgtagtgtgggcacacgagaagtacggaatcgaatcttttgcactgattcacgactccttcggtaccattccggctgacgctgcgaacctgttcaaagcagtgcgcgaaactatggttgacacatatgagtcttgtgatgtactggctgatttctacgaccagttcgctgaccagttgcacgagtctcaattggacaaaatgccagcacttccggctaaaggtaacttgaacctccgtgacatcttagagtcggacttcgcgttcgcg

SEQ ID NO: 110 - protein, 890 aa, synthetic construct
  REGION 1..890: note = Variant of RNA polymerase
MHHHHHHMNTINIAKNDFSDIELAAIPFNTLADHYGERLAREQLALEHESYEMGEARFRKMFERQLKAGEVADNAAAKPLITTLLPKMIARINDWFEEVKAKRGKRPTAFQFLQEIKPEAVAYITIKTTLACLTSADRTTVQAVASAIGRAIEDEARFGRIRDLEAKRFKKNVEEQLNKRVGHVYKKAFMQVVEADMLSKGLLGGEAWSSWHKEDSIHVGVRCIEMLIESTGMVSLHRQNAGVVGQDSETIELAPEYAEAIATRAGALAGISPMFQPCVVPPKPWTGITGGGYWANGRRPLALVRTHSKKGLMRYEDVYMPEVYKAINIAQNTAWSINKWVLAVANVITKWKHCPVRDIPAIEREELPMKPEDIDMNPEALTAWKRAKAAVYRRDKARKSRRILLEFMLEQANKFANHKAIWFPYNMDWRGRVYAVSMFNPQGNDMTKGLLTLAKGKPIGKEGYYWLKIHGANCAGVDKVPFPERIKFIEENHENIMACAKSPLENTWWAEQDLPFCFLAFCFEYAGVQHHGLSYNCSLPLAFDGSCSGIQHFSAMLRDEVGGRAVNLLPSETVQDIYGIVAKKVNEILQADAINGTDNEVVTVTDENTGEISEKVKLGTKALAGQWLAYGVTRSVTKRSVMTLAYGSKEFGFRQQVLEDTIQWAIDSGKGLMFTQPNQAAGYMAKLIWESVSVTVVAAVEAMNWLKSAAKLLAAEVKDKKTGEILRKRCAVHWVTPDGFPVWQEYKKPIQTRLNLMFLGQFRLQPTINTNKDSEIDAHKQESGIAPNFVHSQDGSHLRKTVVWAHEKYGIESFALIHDSFGTIPADAANLFKAVRETMVDTYESCDVLADFYDQFADQLHESQLDKMPALPAKGNLNLRDILESDFAFA

SEQ ID NO: 111 - DNA, 2670 bp, synthetic construct
  misc_feature 1..2670: note = Variant of RNA polymerase
  source 1..2670: mol_type = other DNA
atgcaccatcaccatcaccatatgaacacgattaacatcgctaagaacgacttctctgacatcgaactggctgctatcccgttcaacactctggctgaccattacggtgagcgtttagctcgcgaacagttggcccttgagcatgagtcttacgagatgggtgaagcacgcttccgcaagatgtttgagcgtcaacttaaagctggtgaggttgcggataacgctgccgccaagcctctcatcactaccctactccctaagatgattgcacgcatcaacgactggtttgaggaagtgaaagctaagcgcggcaagcgcccgacagccttccagttcctgcaagaaatcaagccggaagccgtagcgtacatcaccattaagaccactctggcttgcctaaccagtgcggaccgtacaaccgttcaggctgtagcaagcgcaatcggtcgggccattgaggacgaggctcgcttcggtcgtatccgtgaccttgaagctaagcacttcaagaaaaacgttgaggaacaactcaacaagcgcgtagggcacgtctacaagaaagcatttatgcaagttgtcgaggctgacatgctctctaagggtctactcggtggcgaggcgtggtcttcgtggcataaggaagactctattcatgtaggagtacgctgcatcgagatgctcattgagtcaaccggaatggttagcttacaccgccaaaatgctggcgtagtaggtcaagactctgagactatcgaactcgcacctgaatacgctgaggctatcgcaacccgtgcaggtgcgctggctggcatctctccgatgttccaaccttgcgtagttcctcctaagccgtggactggcattactggtggtggctattgggctaacggtcgtcgtcctctggcgctggtgcgtactcacagtaagaaaggtctgatgcgctacgaagacgtttacatgcctgaggtgtacaaagcgattaacattgcgcaaaacaccgcctggtcgatcaacaagtgggtcctggcggtcgccaacgtaatcaccaagtggaagcattgtccggtccgggacatccctgcgattgagcgtgaagaactcccgatgaaaccggaagacatcgacatgaatcctgaggctctcaccgcgtggaaacgtgctaaagctgctgtgtaccgcagagacaaggctcgcaagtctcgccgtatcttgcttgagttcatgcttgagcaagccaataagtttgctaaccataaggccatctggttcccttacaacatggactggcgcggtcgtgtttacgctgtgtcaatgttcaacccgcaaggtaacgatatgaccaaaggactgcttacgctggcgaaaggtaaaccaatcggtaaggaaggttactactggctgaaaatccacggtgcaaactgtgcgggtgtcgataaggttccgttccctgagcgcatcaagttcattgaggaaaaccacgagaacatcatggcttgcgctaagtctccactggagaacacttggtgggctgagcaagatctcccgttctgcttccttgcgttctgctttgagtacgctggggtacagcaccacggcctgagctataactgctcccttccgctggcgtttgacgggtcttgctctggcatccagcacttctccgcgatgctccgagatgaggtaggtggtcgcgcggttaacttgcttcctagtgaaaccgttcaggacatctacgggattgttgctaagaaagtcaacgagattctacaagcagacgcaatcaatgggaccgataacgaagtagttaccgtgaccgatgagaacactggtgaaatctctgagaaagtcaagctgggcactaaggcactggctggtcaatggctggcttacggtgttactcgcagtgtgactaagcgttcagtcatgacgctggcttacgggtccaaagagttcggcttccgtcaacaagtgctggaagatactattcagtgggctattgattccggccggggtctgatgttcactcagccgaatcaggctgctggatacatggctaagctgatttgggaatctgtgagcgtgacggtggtagctgcggttgaagcaatgaactggcttaagtctgctgctaagctgctggctgctgaggtcaaagataagaagactggagagattcttcgcaagcgttgcgctgtgcattgggtaactcctgatggtttccctgtgtggcaggaatacaagaagcctattcagacgcgcttgaacctgatgttcctcggtcagttccgcttacagcctaccattaacaccaacaaagatagcgagattgatgcacacaaacaggagtctggtatcgctcctaactttgtacacagccaagacggtagccaccttcgtaagactgtagtgtgggcacacgagaagtacggaatcgaatcttttgcactgattcacgactccttcggtaccattccggctgacgctgcgaacctgttcaaagcagtgcgcgaaactatggttgacacatatgagtcttgtgatgtactggctgatttctacgaccagttcgctgaccagttgcacgagtctcaattggacaaaatgccagcacttccggctaaaggtaacttgaacctccgtgacatcttagagtcggacttcgcgttcgcg

SEQ ID NO: 112 - protein, 890 aa, synthetic construct
  REGION 1..890: note = Variant of RNA polymerase
MHHHHHHMNTINIAKNDFSDIELAAIPFNTLADHYGERLAREQLALEHESYEMGEARFRKMFERQLKAGEVADNAAAKPLITTLLPKMIARINDWFEEVKAKRGKRPTAFQFLQEIKPEAVAYITIKTTLACLTSADRTTVQAVASAIGRAIEDEARFGRIRDLEAKHFKKNVEEQLNKRVGHVYKKAFMQVVEADMLSKGLLGGEAWSSWHKEDSIHVGVRCIEMLIESTGMVSLHRQNAGVVGQDSETIELAPEYAEAIATRAGALAGISPMFQPCVVPPKPWTGITGGGYWANGRRPLALVRTHSKKGLMRYEDVYMPEVYKAINIAQNTAWSINKWVLAVANVITKWKHCPVRDIPAIEREELPMKPEDIDMNPEALTAWKRAKAAVYRRDKARKSRRILLEFMLEQANKFANHKAIWFPYNMDWRGRVYAVSMFNPQGNDMTKGLLTLAKGKPIGKEGYYWLKIHGANCAGVDKVPFPERIKFIEENHENIMACAKSPLENTWWAEQDLPFCFLAFCFEYAGVQHHGLSYNCSLPLAFDGSCSGIQHFSAMLRDEVGGRAVNLLPSETVQDIYGIVAKKVNEILQADAINGTDNEVVTVTDENTGEISEKVKLGTKALAGQWLAYGVTRSVTKRSVMTLAYGSKEFGFRQQVLEDTIQWAIDSGRGLMFTQPNQAAGYMAKLIWESVSVTVVAAVEAMNWLKSAAKLLAAEVKDKKTGEILRKRCAVHWVTPDGFPVWQEYKKPIQTRLNLMFLGQFRLQPTINTNKDSEIDAHKQESGIAPNFVHSQDGSHLRKTVVWAHEKYGIESFALIHDSFGTIPADAANLFKAVRETMVDTYESCDVLADFYDQFADQLHESQLDKMPALPAKGNLNLRDILESDFAFA

SEQ ID NO: 113 - DNA, 2670 bp, synthetic construct
  misc_feature 1..2670: note = Variant of RNA polymerase
  source 1..2670: mol_type = other DNA
atgcaccatcaccatcaccatatgaacacgattaacatcgctaagaacgacttctctgacatcgaactggctgctatcccgttcaacactctggctgaccattacggtgagcgtttagctcgcgaacagttggcccttgagcatgagtcttacgagatgggtgaagcacgcttccgcaagatgtttgagcgtcaacttaaagctggtgaggttgcggataacgctgccgccaagcctctcatcactaccctactccctaagatgattgcacgcatcaacgactggtttgaggaagtgaaagctaagcgcggcaagcgcccgacagccttccagttcctgcaagaaatcaagccggaagccgtagcgtacatcaccattaagaccactctggcttgcctaaccagtgcggaccgtacaaccgttcaggctgtagcaagcgcaatcggtcgggccattgaggacgaggctcgcttcggtcgtatccgtgaccttgaagctaagacgttcaagaaaaacgttgaggaacaactcaacaagcgcgtagggcacgtctacaagaaagcatttatgcaagttgtcgaggctgacatgctctctaagggtctactcggtggcgaggcgtggtcttcgtggcataaggaagactctattcatgtaggagtacgctgcatcgagatgctcattgagtcaaccggaatggttagcttacaccgccaaaatgctggcgtagtaggtcaagactctgagactatcgaactcgcacctgaatacgctgaggctatcgcaacccgtgcaggtgcgctggctggcatctctccgatgttccaaccttgcgtagttcctcctaagccgtggactggcattactggtggtggctattgggctaacggtcgtcgtcctctggcgctggtgcgtactcacagtaagaaaggtctgatgcgctacgaagacgtttacatgcctgaggtgtacaaagcgattaacattgcgcaaaacaccgcctggtcgatcaacaagtgggtcctggcggtcgccaacgtaatcaccaagtggaagcattgtccggtccgggacatccctgcgattgagcgtgaagaactcccgatgaaaccggaagacatcgacatgaatcctgaggctctcaccgcgtggaaacgtgctaaagctgctgtgtaccgcagagacaaggctcgcaagtctcgccgtatcttgcttgagttcatgcttgagcaagccaataagtttgctaaccataaggccatctggttcccttacaacatggactggcgcggtcgtgtttacgctgtgtcaatgttcaacccgcaaggtaacgatatgaccaaaggactgcttacgctggcgaaaggtaaaccaatcggtaaggaaggttactactggctgaaaatccacggtgcaaactgtgcgggtgtcgataaggttccgttccctgagcgcatcaagttcattgaggaaaaccacgagaacatcatggcttgcgctaagtctccactggagaacacttggtgggctgagcaagatctcccgttctgcttccttgcgttctgctttgagtacgctggggtacagcaccacggcctgagctataactgctcccttccgctggcgtttgacgggtcttgctctggcatccagcacttctccgcgatgctccgagatgaggtaggtggtcgcgcggttaacttgcttcctagtgaaaccgttcaggacatctacgggattgttgctaagaaagtcaacgagattctacaagcagacgcaatcaatgggaccgataacgaagtagttaccgtgaccgatgagaacactggtgaaatctctgagaaagtcaagctgggcactaaggcactggctggtcaatggctggcttacggtgttactcgcagtgtgactaagcgttcagtcatgacgctggcttacgggtccaaagagttcggcttccgtcaacaagtgctggaagatactattcagtgggctattgattccggcaagggtctgatgttcactcagccgaatcaggctgctggatacatggctaagctgatttgggaatctgtgagcgtgacggtggtagctgcggttgaagcaatgaactggcttaagtctgctgctaagctgctggctgctgaggtcaaagataagaagactggagagattcttcgcaagcgttgcgctgtgcattgggtaactcctgatggtttccctgtgtggcaggaatacaagaagcctattcagacgcgcttgaacctgatgttcctcggtcagttccgcttacagcctaccattaacaccaacaaagatagcgagattgatgcacacaaacaggagtctggtatcgctcctaactttgtacacagccaagacggtagccaccttcgtaagactgtagtgtgggcacacgagaagtacggaatcgaatcttttgcactgattcacgactccttcggtaccattccggctgacgctgcgaacctgttcaaagcagtgcgcgaaactatggttgacacatatgagtcttgtgatgtactggctgatttctacgaccagttcgctgaccagttgcacgagtctcaattggacaaaatgccagcacttccggctaaaggtaacttgaacctccgtgacatcttagagtcggacttcgcgttcgcg

SEQ ID NO: 114 - protein, 890 aa, synthetic construct
  REGION 1..890: note = Variant of RNA polymerase
MHHHHHHMNTINIAKNDFSDIELAAIPFNTLADHYGERLAREQLALEHESYEMGEARFRKMFERQLKAGEVADNAAAKPLITTLLPKMIARINDWFEEVKAKRGKRPTAFQFLQEIKPEAVAYITIKTTLACLTSADRTTVQAVASAIGRAIEDEARFGRIRDLEAKTFKKNVEEQLNKRVGHVYKKAFMQVVEADMLSKGLLGGEAWSSWHKEDSIHVGVRCIEMLIESTGMVSLHRQNAGVVGQDSETIELAPEYAEAIATRAGALAGISPMFQPCVVPPKPWTGITGGGYWANGRRPLALVRTHSKKGLMRYEDVYMPEVYKAINIAQNTAWSINKWVLAVANVITKWKHCPVRDIPAIEREELPMKPEDIDMNPEALTAWKRAKAAVYRRDKARKSRRILLEFMLEQANKFANHKAIWFPYNMDWRGRVYAVSMFNPQGNDMTKGLLTLAKGKPIGKEGYYWLKIHGANCAGVDKVPFPERIKFIEENHENIMACAKSPLENTWWAEQDLPFCFLAFCFEYAGVQHHGLSYNCSLPLAFDGSCSGIQHFSAMLRDEVGGRAVNLLPSETVQDIYGIVAKKVNEILQADAINGTDNEVVTVTDENTGEISEKVKLGTKALAGQWLAYGVTRSVTKRSVMTLAYGSKEFGFRQQVLEDTIQWAIDSGKGLMFTQPNQAAGYMAKLIWESVSVTVVAAVEAMNWLKSAAKLLAAEVKDKKTGEILRKRCAVHWVTPDGFPVWQEYKKPIQTRLNLMFLGQFRLQPTINTNKDSEIDAHKQESGIAPNFVHSQDGSHLRKTVVWAHEKYGIESFALIHDSFGTIPADAANLFKAVRETMVDTYESCDVLADFYDQFADQLHESQLDKMPALPAKGNLNLRDILESDFAFA

SEQ ID NO: 115 - DNA, 2670 bp, synthetic construct
  misc_feature 1..2670: note = Variant of RNA polymerase
  source 1..2670: mol_type = other DNA
atgcaccatcaccatcaccatatgaacacgattaacatcgctaagaacgacttctctgacatcgaactggctgctatcccgttcaacactctggctgaccattacggtgagcgtttagctcgcgaacagttggcccttgagcatgagtcttacgagatgggtgaagcacgcttccgcaagatgtttgagcgtcaacttaaagctggtgaggttgcggataacgctgccgccaagcctctcatcactaccctactccctaagatgattgcacgcatcaacgactggtttgaggaagtgaaagctaagcgcggcaagcgcccgacagccttccagttcctgcaagaaatcaagccggaagccgtagcgtacatcaccattaagaccactctggcttgcctaaccagtgcggaccgtacaaccgttcaggctgtagcaagcgcaatcggtcgggccattgaggacgaggctcgcttcggtcgtatccgtgaccttgaagctaagcacttcaagaaaggggttgaggaacaactcaacaagcgcgtagggcacgtctacaagaaagcatttatgcaagttgtcgaggctgacatgctctctaagggtctactcggtggcgaggcgtggtcttcgtggcataaggaagactctattcatgtaggagtacgctgcatcgagatgctcattgagtcaaccggaatggttagcttacaccgccaaaatgctggcgtagtaggtcaagactctgagactatcgaactcgcacctgaatacgctgaggctatcgcaacccgtgcaggtgcgctggctggcatctctccgatgttccaaccttgcgtagttcctcctaagccgtggactggcattactggtggtggctattgggctaacggtcgtcgtcctctggcgctggtgcgtactcacagtaagaaaggtctgatgcgctacgaagacgtttacatgcctgaggtgtacaaagcgattaacattgcgcaaaacaccgcctggtcgatcaacaagtgggtcctggcggtcgccaacgtaatcaccaagtggaagcattgtccggtccgggacatccctgcgattgagcgtgaagaactcccgatgaaaccggaagacatcgacatgaatcctgaggctctcaccgcgtggaaacgtgctaaagctgctgtgtaccgcagagacaaggctcgcaagtctcgccgtatcttgcttgagttcatgcttgagcaagccaataagtttgctaaccataaggccatctggttcccttacaacatggactggcgcggtcgtgtttacgctgtgtcaatgttcaacccgcaaggtaacgatatgaccaaaggactgcttacgctggcgaaaggtaaaccaatcggtaaggaaggttactactggctgaaaatccacggtgcaaactgtgcgggtgtcgataaggttccgttccctgagcgcatcaagttcattgaggaaaaccacgagaacatcatggcttgcgctaagtctccactggagaacacttggtgggctgagcaagatctcccgttctgcttccttgcgttctgctttgagtacgctggggtacagcaccacggcctgagctataactgctcccttccgctggcgtttgacgggtcttgctctggcatccagcacttctccgcgatgctccgagatgaggtaggtggtcgcgcggttaacttgcttcctagtgaaaccgttcaggacatctacgggattgttgctaagaaagtcaacgagattctacaagcagacgcaatcaatgggaccgataacgaagtagttaccgtgaccgatgagaacactggtgaaatctctgagaaagtcaagctgggcactaaggcactggctggtcaatggctggcttacggtgttactcgcagtgtgactaagcgttcagtcatgacgctggcttacgggtccaaagagttcggcttccgtcaacaagtgctggaagatactattcagtgggctattgattccggcaagggtctgatgttcactcagccgaatcaggctgctggatacatggctaagctgatttgggaatctgtgagcgtgacggtggtagctgcggttgaagcaatgaactggcttaagtctgctgctaagctgctggctgctgaggtcaaagataagaagactggagagattcttcgcaagcgttgcgctgtgcattgggtaactcctgatggtttccctgtgtggcaggaatacaagaagcctattcagacgcgcttgaacctgatgttcctcggtcagttccgcttacagcctaccattaacaccaacaaagatagcgagattgatgcacacaaacaggagtctggtatcgctcctaactttgtacacagccaagacggtagccaccttcgtaagactgtagtgtgggcacacgagaagtacggaatcgaatcttttgcactgattcacgactccttcggtaccattccggctgacgctgcgaacctgttcaaagcagtgcgcgaaactatggttgacacatatgagtcttgtgatgtactggctgatttctacgaccagttcgctgaccagttgcacgagtctcaattggacaaaatgccagcacttccggctaaaggtaacttgaacctccgtgacatcttagagtcggacttcgcgttcgcg

SEQ ID NO: 116 - protein, 890 aa, synthetic construct
  REGION 1..890: note = Variant of RNA polymerase
MHHHHHHMNTINIAKNDFSDIELAAIPFNTLADHYGERLAREQLALEHESYEMGEARFRKMFERQLKAGEVADNAAAKPLITTLLPKMIARINDWFEEVKAKRGKRPTAFQFLQEIKPEAVAYITIKTTLACLTSADRTTVQAVASAIGRAIEDEARFGRIRDLEAKHFKKGVEEQLNKRVGHVYKKAFMQVVEADMLSKGLLGGEAWSSWHKEDSIHVGVRCIEMLIESTGMVSLHRQNAGVVGQDSETIELAPEYAEAIATRAGALAGISPMFQPCVVPPKPWTGITGGGYWANGRRPLALVRTHSKKGLMRYEDVYMPEVYKAINIAQNTAWSINKWVLAVANVITKWKHCPVRDIPAIEREELPMKPEDIDMNPEALTAWKRAKAAVYRRDKARKSRRILLEFMLEQANKFANHKAIWFPYNMDWRGRVYAVSMFNPQGNDMTKGLLTLAKGKPIGKEGYYWLKIHGANCAGVDKVPFPERIKFIEENHENIMACAKSPLENTWWAEQDLPFCFLAFCFEYAGVQHHGLSYNCSLPLAFDGSCSGIQHFSAMLRDEVGGRAVNLLPSETVQDIYGIVAKKVNEILQADAINGTDNEVVTVTDENTGEISEKVKLGTKALAGQWLAYGVTRSVTKRSVMTLAYGSKEFGFRQQVLEDTIQWAIDSGKGLMFTQPNQAAGYMAKLIWESVSVTVVAAVEAMNWLKSAAKLLAAEVKDKKTGEILRKRCAVHWVTPDGFPVWQEYKKPIQTRLNLMFLGQFRLQPTINTNKDSEIDAHKQESGIAPNFVHSQDGSHLRKTVVWAHEKYGIESFALIHDSFGTIPADAANLFKAVRETMVDTYESCDVLADFYDQFADQLHESQLDKMPALPAKGNLNLRDILESDFAFA

SEQ ID NO: 117 - DNA, 2670 bp, synthetic construct
  misc_feature 1..2670: note = Variant of RNA polymerase
  source 1..2670: mol_type = other DNA
atgcaccatcaccatcaccatatgaacacgattaacatcgctaagaacgacttctctgacatcgaactggctgctatcccgttcaacactctggctgaccattacggtgagcgtttagctcgcgaacagttggcccttgagcatgagtcttacgagatgggtgaagcacgcttccgcaagatgtttgagcgtcaacttaaagctggtgaggttgcggataacgctgccgccaagcctctcatcactaccctactccctaagatgattgcacgcatcaacgactggtttgaggaagtgaaagctaagcgcggcaagcgcccgacagccttccagttcctgcaagaaatcaagccggaagccgtagcgtacatcaccattaagaccactctggcttgcctaaccagtgcggaccgtacaaccgttcaggctgtagcaagcgcaatcggtcgggccattgaggacgaggctcgcttcggtcgtatccgtgaccttgaagctaagcacttcaagaaaaacgttgaggaacaactcaacaagcgcgtagggcacgtctacaagaaagcatttatgcaagttgtcgaggctgacatgctctctaagggtctactcggtggcgaggcgtggtcttcgtggcataaggaagactctattcatgtaggagtacgctgcatcgagatgctcattgagtcaaccggaatggttagcttacaccgccaaaatgctggcgtagtaggtcaagactctgagactatcgaactcgcacctgaatacgctgaggctatcgcaacccgtgcaggtgcgctggctggcatctctccgatgttccaaccttgcgtagttcctcctaagccgtggactggcattactggtggtggctattgggctaacggtcgtcgtcctctggcgctggtgcgtactcacagtaagaaaggtctgatgcgctacgaagacgtttacatgcctgaggtgtacaaagcgattaacattgcgcaaaacaccgcctggtcgatcaacaagtgggtcctggcggtcgccaacgtaatcaccaagtggaagcattgtccggtccgggacatccctgcgattgagcgtgaagaactcccgatgaaaccggaagacatcgacatgaatcctgctgctctcaccgcgtggaaacgtgctaaagctgctgtgtaccgcagagacaaggctcgcaagtctcgccgtatcttgcttgagttcatgcttgagcaagccaataagtttgctaaccataaggccatctggttcccttacaacatggactggcgcggtcgtgtttacgctgtgtcaatgttcaacccgcaaggtaacgatatgaccaaaggactgcttacgctggcgaaaggtaaaccaatcggtaaggaaggttactactggctgaaaatccacggtgcaaactgtgcgggtgtcgataaggttccgttccctgagcgcatcaagttcattgaggaaaaccacgagaacatcatggcttgcgctaagtctccactggagaacacttggtgggctgagcaagatctcccgttctgcttccttgcgttctgctttgagtacgctggggtacagcaccacggcctgagctataactgctcccttccgctggcgtttgacgggtcttgctctggcatccagcacttctccgcgatgctccgagatgaggtaggtggtcgcgcggttaacttgcttcctagtgaaaccgttcaggacatctacgggattgttgctaagaaagtcaacgagattctacaagcagacgcaatcaatgggaccgataacgaagtagttaccgtgaccgatgagaacactggtgaaatctctgagaaagtcaagctgggcactaaggcactggctggtcaatggctggcttacggtgttactcgcagtgtgactaagcgttcagtcatgacgctggcttacgggtccaaagagttcggcttccgtcaacaagtgctggaagatactattcagtgggctattgattccggcaagggtctgatgttcactcagccgaatcaggctgctggatacatggctaagctgatttgggaatctgtgagcgtgacggtggtagctgcggttgaagcaatgaactggcttaagtctgctgctaagctgctggctgctgaggtcaaagataagaagactggagagattcttcgcaagcgttgcgctgtgcattgggtaactcctgatggtttccctgtgtggcaggaatacaagaagcctattcagacgcgcttgaacctgatgttcctcggtcagttccgcttacagcctaccattaacaccaacaaagatagcgagattgatgcacacaaacaggagtctggtatcgctcctaactttgtacacagccaagacggtagccaccttcgtaagactgtagtgtgggcacacgagaagtacggaatcgaatcttttgcactgattcacgactccttcggtaccattccggctgacgctgcgaacctgttcaaagcagtgcgcgaaactatggttgacacatatgagtcttgtgatgtactggctgatttctacgaccagttcgctgaccagttgcacgagtctcaattggacaaaatgccagcacttccggctaaaggtaacttgaacctccgtgacatcttagagtcggacttcgcgttcgcg

SEQ ID NO: 118 - protein, 890 aa, synthetic construct
  REGION 1..890: note = Variant of RNA polymerase
MHHHHHHMNTINIAKNDFSDIELAAIPFNTLADHYGERLAREQLALEHESYEMGEARFRKMFERQLKAGEVADNAAAKPLITTLLPKMIARINDWFEEVKAKRGKRPTAFQFLQEIKPEAVAYITIKTTLACLTSADRTTVQAVASAIGRAIEDEARFGRIRDLEAKHFKKNVEEQLNKRVGHVYKKAFMQVVEADMLSKGLLGGEAWSSWHKEDSIHVGVRCIEMLIESTGMVSLHRQNAGVVGQDSETIELAPEYAEAIATRAGALAGISPMFQPCVVPPKPWTGITGGGYWANGRRPLALVRTHSKKGLMRYEDVYMPEVYKAINIAQNTAWSINKWVLAVANVITKWKHCPVRDIPAIEREELPMKPEDIDMNPAALTAWKRAKAAVYRRDKARKSRRILLEFMLEQANKFANHKAIWFPYNMDWRGRVYAVSMFNPQGNDMTKGLLTLAKGKPIGKEGYYWLKIHGANCAGVDKVPFPERIKFIEENHENIMACAKSPLENTWWAEQDLPFCFLAFCFEYAGVQHHGLSYNCSLPLAFDGSCSGIQHFSAMLRDEVGGRAVNLLPSETVQDIYGIVAKKVNEILQADAINGTDNEVVTVTDENTGEISEKVKLGTKALAGQWLAYGVTRSVTKRSVMTLAYGSKEFGFRQQVLEDTIQWAIDSGKGLMFTQPNQAAGYMAKLIWESVSVTVVAAVEAMNWLKSAAKLLAAEVKDKKTGEILRKRCAVHWVTPDGFPVWQEYKKPIQTRLNLMFLGQFRLQPTINTNKDSEIDAHKQESGIAPNFVHSQDGSHLRKTVVWAHEKYGIESFALIHDSFGTIPADAANLFKAVRETMVDTYESCDVLADFYDQFADQLHESQLDKMPALPAKGNLNLRDILESDFAFA

SEQ ID NO: 119 - DNA, 2670 bp, synthetic construct
  misc_feature 1..2670: note = Variant of RNA polymerase
  source 1..2670: mol_type = other DNA
atgcaccatcaccatcaccatatgaacacgattaacatcgctaagaacgacttctctgacatcgaactggctgctatcccgttcaacactctggctgaccattacggtgagcgtttagctcgcgaacagttggcccttgagcatgagtcttacgagatgggtgaagcacgcttccgcaagatgtttgagcgtcaacttaaagctggtgaggttgcggataacgctgccgccaagcctctcatcactaccctactccctaagatgattgcacgcatcaacgactggtttgaggaagtgaaagctaagcgcggcaagcgcccgacagccttccagttcctgcaagaaatcaagccggaagccgtagcgtacatcaccattaagaccactctggcttgcctaaccagtgcggaccgtacaaccgttcaggctgtagcaagcgcaatcggtcgggccattgaggacgaggctcgcttcggtcgtatccgtgaccttgaagctaagcacttcaagaaaaacgttgaggaacaactcaacaagcgcgtagggcacgtctacaagaaagcatttatgcaagttgtcgaggctgacatgctctctaagggtctactcggtggcgaggcgtggtcttcgtggcataaggaagactctattcatgtaggagtacgctgcatcgagatgctcattgagtcaaccggaatggttagcttacaccgccaaaatgctggcgtagtaggtcaagactctgagactatcgaactcgcacctgaatacgctgaggctatcgcaacccgtgcaggtgcgctggctggcatctctccgatgttccaaccttgcgtagttcctcctaagccgtggactggcattactggtggtggctattgggctaacggtcgtcgtcctctggcgctggtgcgtactcacagtaagaaaggtctgatgcgctacgaagacgtttacatgcctgaggtgtacaaagcgattaacattgcgcaaaacaccgcctggtcgatcaacaagtgggtcctggcggtcgccaacgtaatcaccaagtggaagcattgtccggtccgggacatccctgcgattgagcgtgaagaactcccgatgaaaccggaagacatcgacatgaatcctgaggctctcaccgcgtggaaacgtgctaaagctgctgtgatgcgcagagacaaggctcgcaagtctcgccgtatcttgcttgagttcatgcttgagcaagccaataagtttgctaaccataaggccatctggttcccttacaacatggactggcgcggtcgtgtttacgctgtgtcaatgttcaacccgcaaggtaacgatatgaccaaaggactgcttacgctggcgaaaggtaaaccaatcggtaaggaaggttactactggctgaaaatccacggtgcaaactgtgcgggtgtcgataaggttccgttccctgagcgcatcaagttcattgaggaaaaccacgagaacatcatggcttgcgctaagtctccactggagaacacttggtgggctgagcaagatctcccgttctgcttccttgcgttctgctttgagtacgctggggtacagcaccacggcctgagctataactgctcccttccgctggcgtttgacgggtcttgctctggcatccagcacttctccgcgatgctccgagatgaggtaggtggtcgcgcggttaacttgcttcctagtgaaaccgttcaggacatctacgggattgttgctaagaaagtcaacgagattctacaagcagacgcaatcaatgggaccgataacgaagtagttaccgtgaccgatgagaacactggtgaaatctctgagaaagtcaagctgggcactaaggcactggctggtcaatggctggcttacggtgttactcgcagtgtgactaagcgttcagtcatgacgctggcttacgggtccaaagagttcggcttccgtcaacaagtgctggaagatactattcagtgggctattgattccggcaagggtctgatgttcactcagccgaatcaggctgctggatacatggctaagctgatttgggaatctgtgagcgtgacggtggtagctgcggttgaagcaatgaactggcttaagtctgctgctaagctgctggctgctgaggtcaaagataagaagactggagagattcttcgcaagcgttgcgctgtgcattgggtaactcctgatggtttccctgtgtggcaggaatacaagaagcctattcagacgcgcttgaacctgatgttcctcggtcagttccgcttacagcctaccattaacaccaacaaagatagcgagattgatgcacacaaacaggagtctggtatcgctcctaactttgtacacagccaagacggtagccaccttcgtaagactgtagtgtgggcacacgagaagtacggaatcgaatcttttgcactgattcacgactccttcggtaccattccggctgacgctgcgaacctgttcaaagcagtgcgcgaaactatggttgacacatatgagtcttgtgatgtactggctgatttctacgaccagttcgctgaccagttgcacgagtctcaattggacaaaatgccagcacttccggctaaaggtaacttgaacctccgtgacatcttagagtcggacttcgcgttcgcg

SEQ ID NO: 120 - protein, 890 aa, synthetic construct
  REGION 1..890: note = Variant of RNA polymerase
MHHHHHHMNTINIAKNDFSDIELAAIPFNTLADHYGERLAREQLALEHESYEMGEARFRKMFERQLKAGEVADNAAAKPLITTLLPKMIARINDWFEEVKAKRGKRPTAFQFLQEIKPEAVAYITIKTTLACLTSADRTTVQAVASAIGRAIEDEARFGRIRDLEAKHFKKNVEEQLNKRVGHVYKKAFMQVVEADMLSKGLLGGEAWSSWHKEDSIHVGVRCIEMLIESTGMVSLHRQNAGVVGQDSETIELAPEYAEAIATRAGALAGISPMFQPCVVPPKPWTGITGGGYWANGRRPLALVRTHSKKGLMRYEDVYMPEVYKAINIAQNTAWSINKWVLAVANVITKWKHCPVRDIPAIEREELPMKPEDIDMNPEALTAWKRAKAAVMRRDKARKSRRILLEFMLEQANKFANHKAIWFPYNMDWRGRVYAVSMFNPQGNDMTKGLLTLAKGKPIGKEGYYWLKIHGANCAGVDKVPFPERIKFIEENHENIMACAKSPLENTWWAEQDLPFCFLAFCFEYAGVQHHGLSYNCSLPLAFDGSCSGIQHFSAMLRDEVGGRAVNLLPSETVQDIYGIVAKKVNEILQADAINGTDNEVVTVTDENTGEISEKVKLGTKALAGQWLAYGVTRSVTKRSVMTLAYGSKEFGFRQQVLEDTIQWAIDSGKGLMFTQPNQAAGYMAKLIWESVSVTVVAAVEAMNWLKSAAKLLAAEVKDKKTGEILRKRCAVHWVTPDGFPVWQEYKKPIQTRLNLMFLGQFRLQPTINTNKDSEIDAHKQESGIAPNFVHSQDGSHLRKTVVWAHEKYGIESFALIHDSFGTIPADAANLFKAVRETMVDTYESCDVLADFYDQFADQLHESQLDKMPALPAKGNLNLRDILESDFAFA

SEQ ID NO: 121 - DNA, 2670 bp, synthetic construct
  misc_feature 1..2670: note = Variant of RNA polymerase
  source 1..2670: mol_type = other DNA
atgcaccatcaccatcaccatatgaacacgattaacatcgctaagaacgacttctctgacatcgaactggctgctatcccgttcaacactctggctgaccattacggtgagcgtttagctcgcgaacagttggcccttgagcatgagtcttacgagatgggtgaagcacgcttccgcaagatgtttgagcgtcaacttaaagctggtgaggttgcggataacgctgccgccaagcctctcatcactaccctactccctaagatgattgcacgcatcaacgactggtttgaggaagtgaaagctaagcgcggcaagcgcccgacagccttccagttcctgcaagaaatcaagccggaagccgtagcgtacatcaccattaagaccactctggcttgcctaaccagtgcggaccgtacaaccgttcaggctgtagcaagcgcaatcggtcgggccattgaggacgaggctcgcttcggtcgtatccgtgaccttgaagctaagcacttcaagaaaaacgttgaggaacaactcaacaagcgcgtagggcacgtctacaagaaagcatttatgcaagttgtcgaggctgacatgctctctaagggtctactcggtggcgaggcgtggtcttcgtggcataaggaagactctattcatgtaggagtacgctgcatcgagatgctcattgagtcaaccggaatggttagcttacaccgccaaaatgctggcgtagtaggtcaagactctgagactatcgaactcgcacctgaatacgctgaggctatcgcaacccgtgcaggtgcgctggctggcatctctccgatgttccaaccttgcgtagttcctcctaagccgtggactggcattactggtggtggctattgggctaacggtcgtcgtcctctggcgctggtgcgtactcacagtaagaaaggtctgatgcgctacgaagacgtttacatgcctgaggtgtacaaagcgattaacattgcgcaaaacaccgcctggtcgatcaacaagtgggtcctggcggtcgccaacgtaatcaccaagtggaagcattgtccggtccgggacatccctgcgattgagcgtgaagaactcccgatgaaaccggaagacatcgacatgaatcctgaggctctcaccgcgtggaaacgtgctaaagctgctgtgtaccgcagagacaaggctcgcaagtctcgccgtatcttgcttgagttcatgcttgagcaagccaataagtttgctaaccatcgtgccatctggttcccttacaacatggactggcgcggtcgtgtttacgctgtgtcaatgttcaacccgcaaggtaacgatatgaccaaaggactgcttacgctggcgaaaggtaaaccaatcggtaaggaaggttactactggctgaaaatccacggtgcaaactgtgcgggtgtcgataaggttccgttccctgagcgcatcaagttcattgaggaaaaccacgagaacatcatggcttgcgctaagtctccactggagaacacttggtgggctgagcaagatctcccgttctgcttccttgcgttctgctttgagtacgctggggtacagcaccacggcctgagctataactgctcccttccgctggcgtttgacgggtcttgctctggcatccagcacttctccgcgatgctccgagatgaggtaggtggtcgcgcggttaacttgcttcctagtgaaaccgttcaggacatctacgggattgttgctaagaaagtcaacgagattctacaagcagacgcaatcaatgggaccgataacgaagtagttaccgtgaccgatgagaacactggtgaaatctctgagaaagtcaagctgggcactaaggcactggctggtcaatggctggcttacggtgttactcgcagtgtgactaagcgttcagtcatgacgctggcttacgggtccaaagagttcggcttccgtcaacaagtgctggaagatactattcagtgggctattgattccggcaagggtctgatgttcactcagccgaatcaggctgctggatacatggctaagctgatttgggaatctgtgagcgtgacggtggtagctgcggttgaagcaatgaactggcttaagtctgctgctaagctgctggctgctgaggtcaaagataagaagactggagagattcttcgcaagcgttgcgctgtgcattgggtaactcctgatggtttccctgtgtggcaggaatacaagaagcctattcagacgcgcttgaacctgatgttcctcggtcagttccgcttacagcctaccattaacaccaacaaagatagcgagattgatgcacacaaacaggagtctggtatcgctcctaactttgtacacagccaagacggtagccaccttcgtaagactgtagtgtgggcacacgagaagtacggaatcgaatcttttgcactgattcacgactccttcggtaccattccggctgacgctgcgaacctgttcaaagcagtgcgcgaaactatggttgacacatatgagtcttgtgatgtactggctgatttctacgaccagttcgctgaccagttgcacgagtctcaattggacaaaatgccagcacttccggctaaaggtaacttgaacctccgtgacatcttagagtcggacttcgcgttcgcg

SEQ ID NO: 122 - protein, 890 aa, synthetic construct
  REGION 1..890: note = Variant of RNA polymerase
MHHHHHHMNTINIAKNDFSDIELAAIPFNTLADHYGERLAREQLALEHESYEMGEARFRKMFERQLKAGEVADNAAAKPLITTLLPKMIARINDWFEEVKAKRGKRPTAFQFLQEIKPEAVAYITIKTTLACLTSADRTTVQAVASAIGRAIEDEARFGRIRDLEAKHFKKNVEEQLNKRVGHVYKKAFMQVVEADMLSKGLLGGEAWSSWHKEDSIHVGVRCIEMLIESTGMVSLHRQNAGVVGQDSETIELAPEYAEAIATRAGALAGISPMFQPCVVPPKPWTGITGGGYWANGRRPLALVRTHSKKGLMRYEDVYMPEVYKAINIAQNTAWSINKWVLAVANVITKWKHCPVRDIPAIEREELPMKPEDIDMNPEALTAWKRAKAAVYRRDKARKSRRILLEFMLEQANKFANHRAIWFPYNMDWRGRVYAVSMFNPQGNDMTKGLLTLAKGKPIGKEGYYWLKIHGANCAGVDKVPFPERIKFIEENHENIMACAKSPLENTWWAEQDLPFCFLAFCFEYAGVQHHGLSYNCSLPLAFDGSCSGIQHFSAMLRDEVGGRAVNLLPSETVQDIYGIVAKKVNEILQADAINGTDNEVVTVTDENTGEISEKVKLGTKALAGQWLAYGVTRSVTKRSVMTLAYGSKEFGFRQQVLEDTIQWAIDSGKGLMFTQPNQAAGYMAKLIWESVSVTVVAAVEAMNWLKSAAKLLAAEVKDKKTGEILRKRCAVHWVTPDGFPVWQEYKKPIQTRLNLMFLGQFRLQPTINTNKDSEIDAHKQESGIAPNFVHSQDGSHLRKTVVWAHEKYGIESFALIHDSFGTIPADAANLFKAVRETMVDTYESCDVLADFYDQFADQLHESQLDKMPALPAKGNLNLRDILESDFAFA

SEQ ID NO: 123 - DNA, 2670 bp, synthetic construct
  misc_feature 1..2670: note = Variant of RNA polymerase
  source 1..2670: mol_type = other DNA
atgcaccatcaccatcaccatatgaacacgattaacatcgctaagaacgacttctctgacatcgaactggctgctatcccgttcaacactctggctgaccattacggtgagcgtttagctcgcgaacagttggcccttgagcatgagtcttacgagatgggtgaagcacgcttccgcaagatgtttgagcgtcaacttaaagctggtgaggttgcggataacgctgccgccaagcctctcatcactaccctactccctaagatgattgcacgcatcaacgactggtttgaggaagtgaaagctaagcgcggcaagcgcccgacagccttccagttcctgcaagaaatcaagccggaagccgtagcgtacatcaccattaagaccactctggcttgcctaaccagtgcggaccgtacaaccgttcaggctgtagcaagcgcaatcggtcgggccattgaggacgaggctcgcttcggtcgtatccgtgaccttgaagctaagcacttcaagaaaaacgttgaggaacaactcaacaagcgcgtagggcacgtctacaagaaagcatttatgcaagttgtcgaggctgacatgctctctaagggtctactcggtggcgaggcgtggtcttcgtggcataaggaagactctattcatgtaggagtacgctgcatcgagatgctcattgagtcaaccggaatggttagcttacaccgccaaaatgctggcgtagtaggtcaagactctgagactatcgaactcgcacctgaatacgctgaggctatcgcaacccgtgcaggtgcgctggctggcatctctccgatgttccaaccttgcgtagttcctcctaagccgtggactggcattactggtggtggctattgggctaacggtcgtcgtcctctggcgctggtgcgtactcacagtaagaaaggtctgatgcgctacgaagacgtttacatgcctgaggtgtacaaagcgattaacattgcgcaaaacaccgcctggtcgatcaacaagtgggtcctggcggtcgccaacgtaatcaccaagtggaagcattgtccggtccgggacatccctgcgattgagcgtgaagaactcccgatgaaaccggaagacatcgacatgaatcctgaggctctcaccgcgtggaaacgtgctaaagctgctgtgcgtcgcagagacaaggctcgcaagtctcgccgtatcttgcttgagttcatgcttgagcaagccaataagtttgctaaccataaggccatctggttcccttacaacatggactggcgcggtcgtgtttacgctgtgtcaatgttcaacccgcaaggtaacgatatgaccaaaggactgcttacgctggcgaaaggtaaaccaatcggtaaggaaggttactactggctgaaaatccacggtgcaaactgtgcgggtgtcgataaggttccgttccctgagcgcatcaagttcattgaggaaaaccacgagaacatcatggcttgcgctaagtctccactggagaacacttggtgggctgagcaagatctcccgttctgcttccttgcgttctgctttgagtacgctggggtacagcaccacggcctgagctataactgctcccttccgctggcgtttgacgggtcttgctctggcatccagcacttctccgcgatgctccgagatgaggtaggtggtcgcgcggttaacttgcttcctagtgaaaccgttcaggacatctacgggattgttgctaagaaagtcaacgagattctacaagcagacgcaatcaatgggaccgataacgaagtagttaccgtgaccgatgagaacactggtgaaatctctgagaaagtcaagctgggcactaaggcactggctggtcaatggctggcttacggtgttactcgcagtgtgactaagcgttcagtcatgacgctggcttacgggtccaaagagttcggcttccgtcaacaagtgctggaagatactattcagtgggctattgattccggcaagggtctgatgttcactcagccgaatcaggctgctggatacatggctaagctgatttgggaatctgtgagcgtgacggtggtagctgcggttgaagcaatgaactggcttaagtctgctgctaagctgctggctgctgaggtcaaagataagaagactggagagattcttcgcaagcgttgcgctgtgcattgggtaactcctgatggtttccctgtgtggcaggaatacaagaagcctattcagacgcgcttgaacctgatgttcctcggtcagttccgcttacagcctaccattaacaccaacaaagatagcgagattgatgcacacaaacaggagtctggtatcgctcctaactttgtacacagccaagacggtagccaccttcgtaagactgtagtgtgggcacacgagaagtacggaatcgaatcttttgcactgattcacgactccttcggtaccattccggctgacgctgcgaacctgttcaaagcagtgcgcgaaactatggttgacacatatgagtcttgtgatgtactggctgatttctacgaccagttcgctgaccagttgcacgagtctcaattggacaaaatgccagcacttccggctaaaggtaacttgaacctccgtgacatcttagagtcggacttcgcgttcgcg

SEQ ID NO: 124 - protein, 890 aa, synthetic construct
  REGION 1..890: note = Variant of RNA polymerase
MHHHHHHMNTINIAKNDFSDIELAAIPFNTLADHYGERLAREQLALEHESYEMGEARFRKMFERQLKAGEVADNAAAKPLITTLLPKMIARINDWFEEVKAKRGKRPTAFQFLQEIKPEAVAYITIKTTLACLTSADRTTVQAVASAIGRAIEDEARFGRIRDLEAKHFKKNVEEQLNKRVGHVYKKAFMQVVEADMLSKGLLGGEAWSSWHKEDSIHVGVRCIEMLIESTGMVSLHRQNAGVVGQDSETIELAPEYAEAIATRAGALAGISPMFQPCVVPPKPWTGITGGGYWANGRRPLALVRTHSKKGLMRYEDVYMPEVYKAINIAQNTAWSINKWVLAVANVITKWKHCPVRDIPAIEREELPMKPEDIDMNPEALTAWKRAKAAVRRRDKARKSRRILLEFMLEQANKFANHKAIWFPYNMDWRGRVYAVSMFNPQGNDMTKGLLTLAKGKPIGKEGYYWLKIHGANCAGVDKVPFPERIKFIEENHENIMACAKSPLENTWWAEQDLPFCFLAFCFEYAGVQHHGLSYNCSLPLAFDGSCSGIQHFSAMLRDEVGGRAVNLLPSETVQDIYGIVAKKVNEILQADAINGTDNEVVTVTDENTGEISEKVKLGTKALAGQWLAYGVTRSVTKRSVMTLAYGSKEFGFRQQVLEDTIQWAIDSGKGLMFTQPNQAAGYMAKLIWESVSVTVVAAVEAMNWLKSAAKLLAAEVKDKKTGEILRKRCAVHWVTPDGFPVWQEYKKPIQTRLNLMFLGQFRLQPTINTNKDSEIDAHKQESGIAPNFVHSQDGSHLRKTVVWAHEKYGIESFALIHDSFGTIPADAANLFKAVRETMVDTYESCDVLADFYDQFADQLHESQLDKMPALPAKGNLNLRDILESDFAFA

SEQ ID NO: 125 - DNA, 2670 bp, synthetic construct
  misc_feature 1..2670: note = Variant of RNA polymerase
  source 1..2670: mol_type = other DNA
atgcaccatcaccatcaccatatgaacacgattaacatcgctaagaacgacttctctgacatcgaactggctgctatcccgttcaacactctggctgaccattacggtgagcgtttagctcgcgaacagttggcccttgagcatgagtcttacgagatgggtgaagcacgcttccgcaagatgtttgagcgtcaacttaaagctggtgaggttgcggataacgctgccgccaagcctctcatcactaccctactccctaagatgattgcacgcatcaacgactggtttgaggaagtgaaagctaagcgcggcaagcgcccgacagccttccagttcctgcaagaaatcaagccggaagccgtagcgtacatcaccattaagaccactctggcttgcctaaccagtgcggaccgtacaaccgttcaggctgtagcaagcgcaatcggtcgggccattgaggacgaggctcgcttcggtcgtatccgtgaccttgaagctaagcacttcaagaaaaacgttgaggaacaactcaacaagcgcgtagggcacgtctacaagaaagcatttatgcaagttgtcgaggctgacatgctctctaagggtctactcggtggcgaggcgtggtcttcgtggcataaggaagactctattcatgtaggagtacgctgcatcgagatgctcattgagtcaaccggaatggttagcttacaccgccaaaatgctggcgtagtaggtcaagactctgagactatcgaactcgcacctgaatacgctgaggctatcgcaacccgtgcaggtgcgctggctggcatctctccgatgttccaaccttgcgtagttcctcctaagccgtggactggcattactggtggtggctattgggctaacggtcgtcgtcctctggcgctggtgcgtactcacagtaagaaaggtctgatgcgctacgaagacgtttacatgcctgaggtgtacaaagcgattaacattgcgcaaaacaccgcctggtcgatcaacaagtgggtcctggcggtcgccaacgtaatcaccaagtggaagcattgtccggtccgggacatccctgcgattgagcgtgaagaactcccgatgaaaccggaagacatcgacatgaatcctgaggctctcaccgcgtggaaacgtgctaaagctgctgtggcgcgcagagacaaggctcgcaagtctcgccgtatcttgcttgagttcatgcttgagcaagccaataagtttgctaaccataaggccatctggttcccttacaacatggactggcgcggtcgtgtttacgctgtgtcaatgttcaacccgcaaggtaacgatatgaccaaaggactgcttacgctggcgaaaggtaaaccaatcggtaaggaaggttactactggctgaaaatccacggtgcaaactgtgcgggtgtcgataaggttccgttccctgagcgcatcaagttcattgaggaaaaccacgagaacatcatggcttgcgctaagtctccactggagaacacttggtgggctgagcaagatctcccgttctgcttccttgcgttctgctttgagtacgctggggtacagcaccacggcctgagctataactgctcccttccgctggcgtttgacgggtcttgctctggcatccagcacttctccgcgatgctccgagatgaggtaggtggtcgcgcggttaacttgcttcctagtgaaaccgttcaggacatctacgggattgttgctaagaaagtcaacgagattctacaagcagacgcaatcaatgggaccgataacgaagtagttaccgtgaccgatgagaacactggtgaaatctctgagaaagtcaagctgggcactaaggcactggctggtcaatggctggcttacggtgttactcgcagtgtgactaagcgttcagtcatgacgctggcttacgggtccaaagagttcggcttccgtcaacaagtgctggaagatactattcagtgggctattgattccggcaagggtctgatgttcactcagccgaatcaggctgctggatacatggctaagctgatttgggaatctgtgagcgtgacggtggtagctgcggttgaagcaatgaactggcttaagtctgctgctaagctgctggctgctgaggtcaaagataagaagactggagagattcttcgcaagcgttgcgctgtgcattgggtaactcctgatggtttccctgtgtggcaggaatacaagaagcctattcagacgcgcttgaacctgatgttcctcggtcagttccgcttacagcctaccattaacaccaacaaagatagcgagattgatgcacacaaacaggagtctggtatcgctcctaactttgtacacagccaagacggtagccaccttcgtaagactgtagtgtgggcacacgagaagtacggaatcgaatcttttgcactgattcacgactccttcggtaccattccggctgacgctgcgaacctgttcaaagcagtgcgcgaaactatggttgacacatatgagtcttgtgatgtactggctgatttctacgaccagttcgctgaccagttgcacgagtctcaattggacaaaatgccagcacttccggctaaaggtaacttgaacctccgtgacatcttagagtcggacttcgcgttcgcg

SEQ ID NO: 126 - protein, 890 aa, synthetic construct
  REGION 1..890: note = Variant of RNA polymerase
MHHHHHHMNTINIAKNDFSDIELAAIPFNTLADHYGERLAREQLALEHESYEMGEARFRKMFERQLKAGEVADNAAAKPLITTLLPKMIARINDWFEEVKAKRGKRPTAFQFLQEIKPEAVAYITIKTTLACLTSADRTTVQAVASAIGRAIEDEARFGRIRDLEAKHFKKNVEEQLNKRVGHVYKKAFMQVVEADMLSKGLLGGEAWSSWHKEDSIHVGVRCIEMLIESTGMVSLHRQNAGVVGQDSETIELAPEYAEAIATRAGALAGISPMFQPCVVPPKPWTGITGGGYWANGRRPLALVRTHSKKGLMRYEDVYMPEVYKAINIAQNTAWSINKWVLAVANVITKWKHCPVRDIPAIEREELPMKPEDIDMNPEALTAWKRAKAAVARRDKARKSRRILLEFMLEQANKFANHKAIWFPYNMDWRGRVYAVSMFNPQGNDMTKGLLTLAKGKPIGKEGYYWLKIHGANCAGVDKVPFPERIKFIEENHENIMACAKSPLENTWWAEQDLPFCFLAFCFEYAGVQHHGLSYNCSLPLAFDGSCSGIQHFSAMLRDEVGGRAVNLLPSETVQDIYGIVAKKVNEILQADAINGTDNEVVTVTDENTGEISEKVKLGTKALAGQWLAYGVTRSVTKRSVMTLAYGSKEFGFRQQVLEDTIQWAIDSGKGLMFTQPNQAAGYMAKLIWESVSVTVVAAVEAMNWLKSAAKLLAAEVKDKKTGEILRKRCAVHWVTPDGFPVWQEYKKPIQTRLNLMFLGQFRLQPTINTNKDSEIDAHKQESGIAPNFVHSQDGSHLRKTVVWAHEKYGIESFALIHDSFGTIPADAANLFKAVRETMVDTYESCDVLADFYDQFADQLHESQLDKMPALPAKGNLNLRDILESDFAFA

SEQ ID NO: 127 - DNA, 2670 bp, synthetic construct
  misc_feature 1..2670: note = Variant of RNA polymerase
  source 1..2670: mol_type = other DNA
atgcaccatcaccatcaccatatgaacacgattaacatcgctaagaacgacttctctgacatcgaactggctgctatcccgttcaacactctggctgaccattacggtgagcgtttagctcgcgaacagttggcccttgagcatgagtcttacgagatgggtgaagcaggtttccgcaagatgtttgagcgtcaacttaaagctggtgaggttgcggataacgctgccgccaagcctctcatcactaccctactccctaagatgattgcacgcatcaacgactggtttgaggaagtgaaagctaagcgcggcaagcgcccgacagccttccagttcctgcaagaaatcaagccggaagccgtagcgtacatcaccattaagaccactctggcttgcctaaccagtgcggaccgtacaaccgttcaggctgtagcaagcgcaatcggtcgggccattgaggacgaggctcgcttcggtcgtatccgtgaccttgaagctaagcacttcaagaaaaacgttgaggaacaactcaacaagcgcgtagggcacgtctacaagaaagcatttatgcaagttgtcgaggctgacatgctctctaagggtctactcggtggcgaggcgtggtcttcgtggcataaggaagactctattcatgtaggagtacgctgcatcgagatgctcattgagtcaaccggaatggttagcttacaccgccaaaatgctggcgtagtaggtcaagactctgagactatcgaactcgcacctgaatacgctgaggctatcgcaacccgtgcaggtgcgctggctggcatctctccgatgttccaaccttgcgtagttcctcctaagccgtggactggcattactggtggtggctattgggctaacggtcgtcgtcctctggcgctggtgcgtactcacagtaagaaaggtctgatgcgctacgaagacgtttacatgcctgaggtgtacaaagcgattaacattgcgcaaaacaccgcctggtcgatcaacaagtgggtcctggcggtcgccaacgtaatcaccaagtggaagcattgtccggtccgggacatccctgcgattgagcgtgaagaactcccgatgaaaccggaagacatcgacatgaatcctgaggctctcaccgcgtggaaacgtgctaaagctgctgtgtaccgcagagacaaggctcgcaagtctcgccgtatcttgcttgagttcatgcttgagcaagccaataagtttgctaaccataaggccatctggttcccttacaacatggactggcgcggtcgtgtttacgctgtgtcaatgttcaacccgcaaggtaacgatatgaccaaaggactgcttacgctggcgaaaggtaaaccaatcggtaaggaaggttactactggctgaaaatccacggtgcaaactgtgcgggtgtcgataaggttccgttccctgagcgcatcaagttcattgaggaaaaccacgagaacatcatggcttgcgctaagtctccactggagaacacttggtgggctgagcaagatctcccgttctgcttccttgcgttctgctttgagtacgctggggtacagcaccacggcctgagctataactgctcccttccgctggcgtttgacgggtcttgctctggcatccagcacttctccgcgatgctccgagatgaggtaggtggtcgcgcggttaacttgcttcctagtgaaaccgttcaggacatctacgggattgttgctaagaaagtcaacgagattctacaagcagacgcaatcaatgggaccgataacgaagtagttaccgtgaccgatgagaacactggtgaaatctctgagaaagtcaagctgggcactaaggcactggctggtcaatggctggcttacggtgttactcgcagtgtgactaagcgttcagtcatgacgctggcttacgggtccaaagagttcggcttccgtcaacaagtgctggaagatactattcagtgggctattgattccggcaagggtctgatgttcactcagccgaatcaggctgctggatacatggctaagctgatttgggaatctgtgagcgtgacggtggtagctgcggttgaagcaatgaactggcttaagtctgctgctaagctgctggctgctgaggtcaaagataagaagactggagagattcttcgcaagcgttgcgctgtgcattgggtaactcctgatggtttccctgtgtggcaggaatacaagaagcctattcagacgcgcttgaacctgatgttcctcggtcagttccgcttacagcctaccattaacaccaacaaagatagcgagattgatgcacacaaacaggagtctggtatcgctcctaactttgtacacagccaagacggtagccaccttcgtaagactgtagtgtgggcacacgagaagtacggaatcgaatcttttgcactgattcacgactccttcggtaccattccggctgacgctgcgaacctgttcaaagcagtgcgcgaaactatggttgacacatatgagtcttgtgatgtactggctgatttctacgaccagttcgctgaccagttgcacgagtctcaattggacaaaatgccagcacttccggctaaaggtaacttgaacctccgtgacatcttagagtcggacttcgcgttcgcg

SEQ ID NO: 128 - protein, 890 aa, synthetic construct
  REGION 1..890: note = Variant of RNA polymerase
MHHHHHHMNTINIAKNDFSDIELAAIPFNTLADHYGERLAREQLALEHESYEMGEAGFRKMFERQLKAGEVADNAAAKPLITTLLPKMIARINDWFEEVKAKRGKRPTAFQFLQEIKPEAVAYITIKTTLACLTSADRTTVQAVASAIGRAIEDEARFGRIRDLEAKHFKKNVEEQLNKRVGHVYKKAFMQVVEADMLSKGLLGGEAWSSWHKEDSIHVGVRCIEMLIESTGMVSLHRQNAGVVGQDSETIELAPEYAEAIATRAGALAGISPMFQPCVVPPKPWTGITGGGYWANGRRPLALVRTHSKKGLMRYEDVYMPEVYKAINIAQNTAWSINKWVLAVANVITKWKHCPVRDIPAIEREELPMKPEDIDMNPEALTAWKRAKAAVYRRDKARKSRRILLEFMLEQANKFANHKAIWFPYNMDWRGRVYAVSMFNPQGNDMTKGLLTLAKGKPIGKEGYYWLKIHGANCAGVDKVPFPERIKFIEENHENIMACAKSPLENTWWAEQDLPFCFLAFCFEYAGVQHHGLSYNCSLPLAFDGSCSGIQHFSAMLRDEVGGRAVNLLPSETVQDIYGIVAKKVNEILQADAINGTDNEVVTVTDENTGEISEKVKLGTKALAGQWLAYGVTRSVTKRSVMTLAYGSKEFGFRQQVLEDTIQWAIDSGKGLMFTQPNQAAGYMAKLIWESVSVTVVAAVEAMNWLKSAAKLLAAEVKDKKTGEILRKRCAVHWVTPDGFPVWQEYKKPIQTRLNLMFLGQFRLQPTINTNKDSEIDAHKQESGIAPNFVHSQDGSHLRKTVVWAHEKYGIESFALIHDSFGTIPADAANLFKAVRETMVDTYESCDVLADFYDQFADQLHESQLDKMPALPAKGNLNLRDILESDFAFA

SEQ ID NO: 129 - DNA, 2670 bp, synthetic construct
  misc_feature 1..2670: note = Variant of RNA polymerase
  source 1..2670: mol_type = other DNA
atgcaccatcaccatcaccatatgaacacgattaacatcgctaagaacgacttctctgacatcgaactggctgctatcccgttcaacactctggctgaccattacggtgagcgtttagctcgcgaacagttggcccttgagcatgagtcttacgagatgggtgaagcacgcttccgcaagatgtttgagcgtcaacttaaagctggtgaggttgcggataacgctgccgccaagcctctcatcactaccctactccctaagatgattgcacgcatcaacgactggtttgaggaagtgaaagctaagcgcggcaagcgcccgacagccttccagttcctgcaagaaatcaagccggaagccgtagcgtacatcaccattaagaccactctggcttgcctaaccagtgcggaccgtacaaccgttcaggctgtagcaagcgcaatcggtcgggccattgaggacgaggctcgcttcggtcgtatccgtgaccttgaagctaagtctttcaagaaaaacgttgaggaacaactcaacaagcgcgtagggcacgtctacaagaaagcatttatgcaagttgtcgaggctgacatgctctctaagggtctactcggtggcgaggcgtggtcttcgtggcataaggaagactctattcatgtaggagtacgctgcatcgagatgctcattgagtcaaccggaatggttagcttacaccgccaaaatgctggcgtagtaggtcaagactctgagactatcgaactcgcacctgaatacgctgaggctatcgcaacccgtgcaggtgcgctggctggcatctctccgatgttccaaccttgcgtagttcctcctaagccgtggactggcattactggtggtggctattgggctaacggtcgtcgtcctctggcgctggtgcgtactcacagtaagaaaggtctgatgcgctacgaagacgtttacatgcctgaggtgtacaaagcgattaacattgcgcaaaacaccgcctggtcgatcaacaagtgggtcctggcggtcgccaacgtaatcaccaagtggaagcattgtccggtccgggacatccctgcgattgagcgtgaagaactcccgatgaaaccggaagacatcgacatgaatcctgaggctctcaccgcgtggaaacgtgctaaagctgctgtgtaccgcagagacaaggctcgcaagtctcgccgtatcttgcttgagttcatgcttgagcaagccaataagtttgctaaccataaggccatctggttcccttacaacatggactggcgcggtcgtgtttacgctgtgtcaatgttcaacccgcaaggtaacgatatgaccaaaggactgcttacgctggcgaaaggtaaaccaatcggtaaggaaggttactactggctgaaaatccacggtgcaaactgtgcgggtgtcgataaggttccgttccctgagcgcatcaagttcattgaggaaaaccacgagaacatcatggcttgcgctaagtctccactggagaacacttggtgggctgagcaagatctcccgttctgcttccttgcgttctgctttgagtacgctggggtacagcaccacggcctgagctataactgctcccttccgctggcgtttgacgggtcttgctctggcatccagcacttctccgcgatgctccgagatgaggtaggtggtcgcgcggttaacttgcttcctagtgaaaccgttcaggacatctacgggattgttgctaagaaagtcaacgagattctacaagcagacgcaatcaatgggaccgataacgaagtagttaccgtgaccgatgagaacactggtgaaatctctgagaaagtcaagctgggcactaaggcactggctggtcaatggctggcttacggtgttactcgcagtgtgactaagcgttcagtcatgacgctggcttacgggtccaaagagttcggcttccgtcaacaagtgctggaagatactattcagtgggctattgattccggcaagggtctgatgttcactcagccgaatcaggctgctggatacatggctaagctgatttgggaatctgtgagcgtgacggtggtagctgcggttgaagcaatgaactggcttaagtctgctgctaagctgctggctgctgaggtcaaagataagaagactggagagattcttcgcaagcgttgcgctgtgcattgggtaactcctgatggtttccctgtgtggcaggaatacaagaagcctattcagacgcgcttgaacctgatgttcctcggtcagttccgcttacagcctaccattaacaccaacaaagatagcgagattgatgcacacaaacaggagtctggtatcgctcctaactttgtacacagccaagacggtagccaccttcgtaagactgtagtgtgggcacacgagaagtacggaatcgaatcttttgcactgattcacgactccttcggtaccattccggctgacgctgcgaacctgttcaaagcagtgcgcgaaactatggttgacacatatgagtcttgtgatgtactggctgatttctacgaccagttcgctgaccagttgcacgagtctcaattggacaaaatgccagcacttccggctaaaggtaacttgaacctccgtgacatcttagagtcggacttcgcgttcgcg

SEQ ID NO: 130 - protein, 890 aa, synthetic construct
  REGION 1..890: note = Variant of RNA polymerase
MHHHHHHMNTINIAKNDFSDIELAAIPFNTLADHYGERLAREQLALEHESYEMGEARFRKMFERQLKAGEVADNAAAKPLITTLLPKMIARINDWFEEVKAKRGKRPTAFQFLQEIKPEAVAYITIKTTLACLTSADRTTVQAVASAIGRAIEDEARFGRIRDLEAKSFKKNVEEQLNKRVGHVYKKAFMQVVEADMLSKGLLGGEAWSSWHKEDSIHVGVRCIEMLIESTGMVSLHRQNAGVVGQDSETIELAPEYAEAIATRAGALAGISPMFQPCVVPPKPWTGITGGGYWANGRRPLALVRTHSKKGLMRYEDVYMPEVYKAINIAQNTAWSINKWVLAVANVITKWKHCPVRDIPAIEREELPMKPEDIDMNPEALTAWKRAKAAVYRRDKARKSRRILLEFMLEQANKFANHKAIWFPYNMDWRGRVYAVSMFNPQGNDMTKGLLTLAKGKPIGKEGYYWLKIHGANCAGVDKVPFPERIKFIEENHENIMACAKSPLENTWWAEQDLPFCFLAFCFEYAGVQHHGLSYNCSLPLAFDGSCSGIQHFSAMLRDEVGGRAVNLLPSETVQDIYGIVAKKVNEILQADAINGTDNEVVTVTDENTGEISEKVKLGTKALAGQWLAYGVTRSVTKRSVMTLAYGSKEFGFRQQVLEDTIQWAIDSGKGLMFTQPNQAAGYMAKLIWESVSVTVVAAVEAMNWLKSAAKLLAAEVKDKKTGEILRKRCAVHWVTPDGFPVWQEYKKPIQTRLNLMFLGQFRLQPTINTNKDSEIDAHKQESGIAPNFVHSQDGSHLRKTVVWAHEKYGIESFALIHDSFGTIPADAANLFKAVRETMVDTYESCDVLADFYDQFADQLHESQLDKMPALPAKGNLNLRDILESDFAFA

SEQ ID NO: 131 - DNA, 2670 bp, synthetic construct
  misc_feature 1..2670: note = Variant of RNA polymerase
  source 1..2670: mol_type = other DNA
atgcaccatcaccatcaccatatgaacacgattaacatcgctaagaacgacttctctgacatcgaactggctgctatcccgttcaacactctggctgaccattacggtgagcgtttagctcgcgaacagttggcccttgagcatgagtcttacgagatgggtgaagcacgcttccgcaagatgtttgagcgtcaacttaaagctggtgaggttgcggataacgctgccgccaagcctctcatcactaccctactccctaagatgattgcacgcatcaacgactggtttgaggaagtgaaagctaagcgcggcaagcgcccgacagccttccagttcctgcaagaaatcaagccggaagccgtagcgtacatcaccattaagaccactctggcttgcctaaccagtgcggaccgtacaaccgttcaggctgtagcaagcgcaatcggtcgggccattgaggacgaggctcgcttcggtcgtatccgtgactgggaagctaagcacttcaagaaaaacgttgaggaacaactcaacaagcgcgtagggcacgtctacaagaaagcatttatgcaagttgtcgaggctgacatgctctctaagggtctactcggtggcgaggcgtggtcttcgtggcataaggaagactctattcatgtaggagtacgctgcatcgagatgctcattgagtcaaccggaatggttagcttacaccgccaaaatgctggcgtagtaggtcaagactctgagactatcgaactcgcacctgaatacgctgaggctatcgcaacccgtgcaggtgcgctggctggcatctctccgatgttccaaccttgcgtagttcctcctaagccgtggactggcattactggtggtggctattgggctaacggtcgtcgtcctctggcgctggtgcgtactcacagtaagaaaggtctgatgcgctacgaagacgtttacatgcctgaggtgtacaaagcgattaacattgcgcaaaacaccgcctggtcgatcaacaagtgggtcctggcggtcgccaacgtaatcaccaagtggaagcattgtccggtccgggacatccctgcgattgagcgtgaagaactcccgatgaaaccggaagacatcgacatgaatcctgaggctctcaccgcgtggaaacgtgctaaagctgctgtgtaccgcagagacaaggctcgcaagtctcgccgtatcttgcttgagttcatgcttgagcaagccaataagtttgctaaccataaggccatctggttcccttacaacatggactggcgcggtcgtgtttacgctgtgtcaatgttcaacccgcaaggtaacgatatgaccaaaggactgcttacgctggcgaaaggtaaaccaatcggtaaggaaggttactactggctgaaaatccacggtgcaaactgtgcgggtgtcgataaggttccgttccctgagcgcatcaagttcattgaggaaaaccacgagaacatcatggcttgcgctaagtctccactggagaacacttggtgggctgagcaagatctcccgttctgcttccttgcgttctgctttgagtacgctggggtacagcaccacggcctgagctataactgctcccttccgctggcgtttgacgggtcttgctctggcatccagcacttctccgcgatgctccgagatgaggtaggtggtcgcgcggttaacttgcttcctagtgaaaccgttcaggacatctacgggattgttgctaagaaagtcaacgagattctacaagcagacgcaatcaatgggaccgataacgaagtagttaccgtgaccgatgagaacactggtgaaatctctgagaaagtcaagctgggcactaaggcactggctggtcaatggctggcttacggtgttactcgcagtgtgactaagcgttcagtcatgacgctggcttacgggtccaaagagttcggcttccgtcaacaagtgctggaagatactattcagtgggctattgattccggcaagggtctgatgttcactcagccgaatcaggctgctggatacatggctaagctgatttgggaatctgtgagcgtgacggtggtagctgcggttgaagcaatgaactggcttaagtctgctgctaagctgctggctgctgaggtcaaagataagaagactggagagattcttcgcaagcgttgcgctgtgcattgggtaactcctgatggtttccctgtgtggcaggaatacaagaagcctattcagacgcgcttgaacctgatgttcctcggtcagttccgcttacagcctaccattaacaccaacaaagatagcgagattgatgcacacaaacaggagtctggtatcgctcctaactttgtacacagccaagacggtagccaccttcgtaagactgtagtgtgggcacacgagaagtacggaatcgaatcttttgcactgattcacgactccttcggtaccattccggctgacgctgcgaacctgttcaaagcagtgcgcgaaactatggttgacacatatgagtcttgtgatgtactggctgatttctacgaccagttcgctgaccagttgcacgagtctcaattggacaaaatgccagcacttccggctaaaggtaacttgaacctccgtgacatcttagagtcggacttcgcgttcgcg

SEQ ID NO: 132 - protein, 890 aa, synthetic construct
  REGION 1..890: note = Variant of RNA polymerase
MHHHHHHMNTINIAKNDFSDIELAAIPFNTLADHYGERLAREQLALEHESYEMGEARFRKMFERQLKAGEVADNAAAKPLITTLLPKMIARINDWFEEVKAKRGKRPTAFQFLQEIKPEAVAYITIKTTLACLTSADRTTVQAVASAIGRAIEDEARFGRIRDWEAKHFKKNVEEQLNKRVGHVYKKAFMQVVEADMLSKGLLGGEAWSSWHKEDSIHVGVRCIEMLIESTGMVSLHRQNAGVVGQDSETIELAPEYAEAIATRAGALAGISPMFQPCVVPPKPWTGITGGGYWANGRRPLALVRTHSKKGLMRYEDVYMPEVYKAINIAQNTAWSINKWVLAVANVITKWKHCPVRDIPAIEREELPMKPEDIDMNPEALTAWKRAKAAVYRRDKARKSRRILLEFMLEQANKFANHKAIWFPYNMDWRGRVYAVSMFNPQGNDMTKGLLTLAKGKPIGKEGYYWLKIHGANCAGVDKVPFPERIKFIEENHENIMACAKSPLENTWWAEQDLPFCFLAFCFEYAGVQHHGLSYNCSLPLAFDGSCSGIQHFSAMLRDEVGGRAVNLLPSETVQDIYGIVAKKVNEILQADAINGTDNEVVTVTDENTGEISEKVKLGTKALAGQWLAYGVTRSVTKRSVMTLAYGSKEFGFRQQVLEDTIQWAIDSGKGLMFTQPNQAAGYMAKLIWESVSVTVVAAVEAMNWLKSAAKLLAAEVKDKKTGEILRKRCAVHWVTPDGFPVWQEYKKPIQTRLNLMFLGQFRLQPTINTNKDSEIDAHKQESGIAPNFVHSQDGSHLRKTVVWAHEKYGIESFALIHDSFGTIPADAANLFKAVRETMVDTYESCDVLADFYDQFADQLHESQLDKMPALPAKGNLNLRDILESDFAFA

SEQ ID NO: 133 - DNA, 2670 bp, synthetic construct
  misc_feature 1..2670: note = Variant of RNA polymerase
  source 1..2670: mol_type = other DNA
atgcaccatcaccatcaccatatgaacacgattaacatcgctaagaacgacttctctgacatcgaactggctgctatcccgttcaacactctggctgaccattacggtgagcgtttagctcgcgaacagttggcccttgagcatgagtcttacgagatgggtgaagcacgcttccgcaagatgtttgagcgtcaacttaaagctggtgaggttgcggataacgctgccgccaagcctctcatcactaccctactccctaagatgattgcacgcatcaacgactggtttgaggaagtgaaagctaagcgcggcaagcgcccgacagccttccagttcctgcaagaaatcaagccggaagccgtagcgtacatcaccattaagaccactctggcttgcctaaccagtgcggaccgtacaaccgttcaggctgtagcaagtgcaatcggtcgggccattgaggacgaggctcgcttcggtcgtatccgtgaccttgaagctaagcacttcaagaaaaacgttgaggaacaactcaacaagcgcgtagggcacgtctacaagaaagcatttatgcaagttgtcgaggctgacatgctctctaagggtctactcggtggcgaggcgtggtcttcgtggcataaggaagactctattcatgtaggagtacgctgcatcgagatgctcattgagtcaaccggaatggttagcttacaccgccaaaatgctggcgtagtaggtcaagactctgagactatcgaactcgcacctgaatacgctgaggctatcgcaacccgtgcaggtgcgctggctggcatctctccgatgttccaaccttgcgtagttcctcctaagccgtggactggcattactggtggtggctattgggctaacggtcgtcgtcctctggcgctggtgcgtactcacagtaagaaaggtctgatgcgctacgaagacgtttacatgcctgaggtgtacaaagcgattaacattgcgcaaaacaccgcctggtcgatcaacaagtgggtcctggcggtcgccaacgtaatcaccaagtggaagcattgtccggtccgggacatccctgcgattgagcgtgaagaactcccgatgaaaccggaagacatcgacatgaatcctgaggctctcaccgcgtggaaacgtgctaaagctgctgtgtaccgcagagacaaggctcgcaagtctcgccgtatcttgcttgagttcatgcttgagcaagccaataagtttgctaaccataaggccatctggttcccttacaacatggactggcgcggtcgtgtttacgctgtgtcaatgttcaacccgcaaggtaacgatatgaccaaaggactgcttacgctggcgaaaggtaaaccaatcggtaaggaaggttactactggctgaaaatccacggtgcaaactgtgcgggtgtcgataaggttccgttccctgagcgcatcaagttcattgaggaaaaccacgagaacatcatggcttgcgctaagtctccactggagaacacttggtgggctgagcaagatctcccgttctgcttccttgcgttctgctttgagtacgctggggtacagcaccacggcctgagctataactgctcccttccgctggcgtttgacgggtcttgctctggcatccagcacttctccgcgatgctccgagatgaggtaggtggtcgcgcggttaacttgcttcctagtgaaaccgttcaggacatctacgggattgttgctaagaaagtcaacgagattctacaagcagacgcaatcaatgggaccgataacgaagtagttaccgtgaccgatgagaacactggtgaaatctctgagaaagtcaagctgggcactaaggcactggctggtcaatggctggcttacggtgttactcgcagtgtgactaagcgttcagtcatgacgctggcttacgggtccaaagagttcggcttccgtcaacaagtgctggaagatactattcagtgggctattgattccggccagggtctgatgttcactcagccgaatcaggctgctggatacatggctaagctgatttgggaatctgtgagcgtgacggtggtagctgcggttgaagcaatgaactggcttaagtctgctgctaagctgctggctgctgaggtcaaagataagaagactggagagattcttcgcaagcgttgcgctgtgcattgggtaactcctgatggtttccctgtgtggcaggaatacaagaagcctattcagacgcgcttgaacctgatgttcctcggtcagttccgcttacagcctaccattaacaccaacaaagatagcgagattgatgcacacaaacaggagtctggtatcgctcctaactttgtacacagccaagacggtagccaccttcgtaagactgtagtgtgggcacacgagaagtacggaatcgaatcttttgcactgattcacgactccttcggtaccattccggctgacgctgcgaacctgttcaaagcagtgcgcgaaactatggttgacacatatgagtcttgtgatgtactggctgatttctacgaccagttcgctgaccagttgcacgagtctcaattggacaaaatgccagcacttccggctaaaggtaacttgaacctccgtgacatcttagagtcggacttcgcgttcgcg

SEQ ID NO: 134 - protein, 890 aa, synthetic construct
  REGION 1..890: note = Variant of RNA polymerase
MHHHHHHMNTINIAKNDFSDIELAAIPFNTLADHYGERLAREQLALEHESYEMGEARFRKMFERQLKAGEVADNAAAKPLITTLLPKMIARINDWFEEVKAKRGKRPTAFQFLQEIKPEAVAYITIKTTLACLTSADRTTVQAVASAIGRAIEDEARFGRIRDLEAKHFKKNVEEQLNKRVGHVYKKAFMQVVEADMLSKGLLGGEAWSSWHKEDSIHVGVRCIEMLIESTGMVSLHRQNAGVVGQDSETIELAPEYAEAIATRAGALAGISPMFQPCVVPPKPWTGITGGGYWANGRRPLALVRTHSKKGLMRYEDVYMPEVYKAINIAQNTAWSINKWVLAVANVITKWKHCPVRDIPAIEREELPMKPEDIDMNPEALTAWKRAKAAVYRRDKARKSRRILLEFMLEQANKFANHKAIWFPYNMDWRGRVYAVSMFNPQGNDMTKGLLTLAKGKPIGKEGYYWLKIHGANCAGVDKVPFPERIKFIEENHENIMACAKSPLENTWWAEQDLPFCFLAFCFEYAGVQHHGLSYNCSLPLAFDGSCSGIQHFSAMLRDEVGGRAVNLLPSETVQDIYGIVAKKVNEILQADAINGTDNEVVTVTDENTGEISEKVKLGTKALAGQWLAYGVTRSVTKRSVMTLAYGSKEFGFRQQVLEDTIQWAIDSGQGLMFTQPNQAAGYMAKLIWESVSVTVVAAVEAMNWLKSAAKLLAAEVKDKKTGEILRKRCAVHWVTPDGFPVWQEYKKPIQTRLNLMFLGQFRLQPTINTNKDSEIDAHKQESGIAPNFVHSQDGSHLRKTVVWAHEKYGIESFALIHDSFGTIPADAANLFKAVRETMVDTYESCDVLADFYDQFADQLHESQLDKMPALPAKGNLNLRDILESDFAFA

SEQ ID NO: 135 - DNA, 2670 bp, synthetic construct
  misc_feature 1..2670: note = Variant of RNA polymerase
  source 1..2670: mol_type = other DNA
atgcaccatcaccatcaccatatgaacacgattaacatcgctaagaacgacttctctgacatcgaactggctgctatcccgttcaacactctggctgaccattacggtgagcgtttagctcgcgaacagttggcccttgagcatgagtcttacgagatgggtgaagcacgcttccgcaagatgtttgagcgtcaacttaaagctggtgaggttgcggataacgctgccgccaagcctctcatcactaccctactccctaagatgattgcacgcatcaacgactggtttgaggaagtgaaagctaagcgcggcaagcgcccgacagccttccagttcctgcaagaaatcaagccggaagccgtagcgtacatcaccattaagaccactctggcttgcctaaccagtgcggaccgtacaaccgttcaggctgtagcaagcgcaatcggtcgggccattgaggacgaggctcgcttcggtcgtatccgtgaccttgaagctaagcacttcaagaaaaacgttgaggaacaactcaacaagcgcgtagggcacgtctacaagaaagcatttatgcaagttgtcgaggctgacatgctctctaagggtctactcggtggcgaggcgtggtcttcgtggcataaggaagactctattcatgtaggagtacgctgcatcgagatgctcattgagtcaaccggaatggttagcttacaccgccaaaatgctggcgtagtaggtcaagactctgagactatcgaactcgcacctgaatacgctgaggctatcgcaacccgtgcaggtgcgctggctggcatctctccgatgttccaaccttgcgtagttcctcctaagccgtggactggcattactggtggtggctattgggctaacggtcgtcgtcctctggcgctggtgcgtactcacagtaagaaaggtctgatgcgctacgaagacgtttacatgcctgaggtgtacaaagcgattaacattgcgcaaaacaccgcctggtcgatcaacaagtgggtcctggcggtcgccaacgtaatcaccaagtggaagcattgtccggtccgggacatccctgcgattgagcgtgaagaactcccgatgaaaccggaagacatcgacatgaatcctgaggctctcaccgcgtggaaacgtgctaaagctgctgtgtaccgcagagacaaggctcgcaagtctcgccgtatcttgcttgagttcatgcttgagcaagccaataagtttgctaaccataaggccatctggttcccttacaacatggactggcgcggtcgtgtttacgctgtgtcaatgttcaacccgcaaggtaacgatatgaccaaaggactgcttacgctggcgaaaggtaaaccaatcggtaaggaaggttactactggctgaaaatccacggtgcaaactgtgcgggtgtcgataaggttccgttccctgagcgcatcaagttcattgaggaaaaccacgagaacatcatggcttgcgctaagtctccactggagaacacttggtgggctgagcaagatctcccgttctgcttccttgcgttctgctttgagtacgctggggtacagcaccacggcctgagctataactgctcccttccgctggcgtttgacgggtcttgctctggcatccagcacttctccgcgatgctccgagatgaggtaggtggtcgcgcggttaacttgcttcctagtgaaaccgttcaggacatctacgggattgttgctaagaaagtcaacgagattctacaagcagacgcaatcaatgggaccgataacgaagtagttaccgtgaccgatgagaacactggtgaaatctctgagaaagtcaagctgggcactaaggcactggctggtcaatggctggcttacggtgttactcgcagtgtgactaagcgttcagtcatgacgctggcttacgggtccaaagagttcggcttccgtcaacaagtgctggaagatactattcagtgggctattgattccggcaagggtctgatgttcactcagccgaatcaggctgctggatacatggctaagctgatttgggaatctgtgagcgtgacggtggtagctgcggttgaagcaatgaactggcttaagtctgctgctaagctgctggctgctgaggtcaaagataagaagactggagagattcttcgcaagcgttgcgctgtgcattgggtaactcctgatggtttccctgtgtggcaggaatacaagaagcctattcagacgcgcttgaacctgatgttcctcggtcagttccgcttacagcctaccattaacaccaacaaagatagcgagattgatgcacacaaacaggagtctggtatcgctcctaactttgtacacagccaagacggtagccaccttcgtaagactgtagtgtgggcacacgagaagtacaagatcgaatcttttgcactgattcacgactccttcggtaccattccggctgacgctgcgaacctgttcaaagcagtgcgcgaaactatggttgacacatatgagtcttgtgatgtactggctgatttctacgaccagttcgctgaccagttgcacgagtctcaattggacaaaatgccagcacttccggctaaaggtaacttgaacctccgtgacatcttagagtcggacttcgcgttcgcg

SEQ ID NO: 136 - protein, 890 aa, synthetic construct
  REGION 1..890: note = Variant of RNA polymerase
MHHHHHHMNTINIAKNDFSDIELAAIPFNTLADHYGERLAREQLALEHESYEMGEARFRKMFERQLKAGEVADNAAAKPLITTLLPKMIARINDWFEEVKAKRGKRPTAFQFLQEIKPEAVAYITIKTTLACLTSADRTTVQAVASAIGRAIEDEARFGRIRDLEAKHFKKNVEEQLNKRVGHVYKKAFMQVVEADMLSKGLLGGEAWSSWHKEDSIHVGVRCIEMLIESTGMVSLHRQNAGVVGQDSETIELAPEYAEAIATRAGALAGISPMFQPCVVPPKPWTGITGGGYWANGRRPLALVRTHSKKGLMRYEDVYMPEVYKAINIAQNTAWSINKWVLAVANVITKWKHCPVRDIPAIEREELPMKPEDIDMNPEALTAWKRAKAAVYRRDKARKSRRILLEFMLEQANKFANHKAIWFPYNMDWRGRVYAVSMFNPQGNDMTKGLLTLAKGKPIGKEGYYWLKIHGANCAGVDKVPFPERIKFIEENHENIMACAKSPLENTWWAEQDLPFCFLAFCFEYAGVQHHGLSYNCSLPLAFDGSCSGIQHFSAMLRDEVGGRAVNLLPSETVQDIYGIVAKKVNEILQADAINGTDNEVVTVTDENTGEISEKVKLGTKALAGQWLAYGVTRSVTKRSVMTLAYGSKEFGFRQQVLEDTIQWAIDSGKGLMFTQPNQAAGYMAKLIWESVSVTVVAAVEAMNWLKSAAKLLAAEVKDKKTGEILRKRCAVHWVTPDGFPVWQEYKKPIQTRLNLMFLGQFRLQPTINTNKDSEIDAHKQESGIAPNFVHSQDGSHLRKTVVWAHEKYKIESFALIHDSFGTIPADAANLFKAVRETMVDTYESCDVLADFYDQFADQLHESQLDKMPALPAKGNLNLRDILESDFAFA

SEQ ID NO: 137 - DNA, 2670 bp, synthetic construct
  misc_feature 1..2670: note = Variant of RNA polymerase
  source 1..2670: mol_type = other DNA
atgcaccatcaccatcaccatatgaacacgattaacatcgctaagaacgacttctctgacatcgaactggctgctatcccgttcaacactctggctgaccattacggtgagcgtttagctcgcgaacagttggcccttgagcatgagtcttacgagatgggtgaagcacgcttccgcaagatgtttgagcgtcaacttaaagctggtgaggttgcggataacgctgccgccaagcctctcatcactaccctactccctaagatgattgcacgcatcaacgactggtttgaggaagtgaaagctaagcgcggcaagcgcccgacagccttccagttcctgcaagaaatcaagccggaagccgtagcgtacatcaccattaagaccactctggcttgcctaaccagtgcggaccgtacaaccgttcaggctgtagcaagcgcaatcggtcgggccattgaggacgaggctcgcttcggtcgtatccgtgaccttgaagctaagcacttcaagaaaaacgttgaggaacaactcaacaagcgcgtagggcacgtctacaagaaagcatttatgcaagttgtcgaggctgacatgctctctaagggtctactcggtggcgaggcgtggtcttcgtggcataaggaagactctattcatgtaggagtacgctgcatcgagatgctcattgagtcaaccggaatggttagcttacaccgccaaaatgctggcgtagtaggtcaagactctgagactatcgaactcgcacctgaatacgctgaggctatcgcaacccgtgcaggtgcgctggctggcatctctccgatgttccaaccttgcgtagttcctcctaagccgtggactggcattactggtggtggctattgggctaacggtcgtcgtcctctggcgctggtgcgtactcacagtaagaaaggtctgatgcgctacgaagacgtttacatgcctgaggtgtacaaagcgattaacattgcgcaaaacaccgcctggtcgatcaacaagtgggtcctggcggtcgccaacgtaatcaccaagtggaagcattgtccggtccgggacatccctgcgattgagcgtgaagaactcccgatgaaaccggaagacatcgacatgaatcctgaggctctcggggcgtggaaacgtgctaaagctgctgtgtaccgcagagacaaggctcgcaagtctcgccgtatcttgcttgagttcatgcttgagcaagccaataagtttgctaaccataaggccatctggttcccttacaacatggactggcgcggtcgtgtttacgctgtgtcaatgttcaacccgcaaggtaacgatatgaccaaaggactgcttacgctggcgaaaggtaaaccaatcggtaaggaaggttactactggctgaaaatccacggtgcaaactgtgcgggtgtcgataaggttccgttccctgagcgcatcaagttcattgaggaaaaccacgagaacatcatggcttgcgctaagtctccactggagaacacttggtgggctgagcaagatctcccgttctgcttccttgcgttctgctttgagtacgctggggtacagcaccacggcctgagctataactgctcccttccgctggcgtttgacgggtcttgctctggcatccagcacttctccgcgatgctccgagatgaggtaggtggtcgcgcggttaacttgcttcctagtgaaaccgttcaggacatctacgggattgttgctaagaaagtcaacgagattctacaagcagacgcaatcaatgggaccgataacgaagtagttaccgtgaccgatgagaacactggtgaaatctctgagaaagtcaagctgggcactaaggcactggctggtcaatggctggcttacggtgttactcgcagtgtgactaagcgttcagtcatgacgctggcttacgggtccaaagagttcggcttccgtcaacaagtgctggaagatactattcagtgggctattgattccggcaagggtctgatgttcactcagccgaatcaggctgctggatacatggctaagctgatttgggaatctgtgagcgtgacggtggtagctgcggttgaagcaatgaactggcttaagtctgctgctaagctgctggctgctgaggtcaaagataagaagactggagagattcttcgcaagcgttgcgctgtgcattgggtaactcctgatggtttccctgtgtggcaggaatacaagaagcctattcagacgcgcttgaacctgatgttcctcggtcagttccgcttacagcctaccattaacaccaacaaagatagcgagattgatgcacacaaacaggagtctggtatcgctcctaactttgtacacagccaagacggtagccaccttcgtaagactgtagtgtgggcacacgagaagtacggaatcgaatcttttgcactgattcacgactccttcggtaccattccggctgacgctgcgaacctgttcaaagcagtgcgcgaaactatggttgacacatatgagtcttgtgatgtactggctgatttctacgaccagttcgctgaccagttgcacgagtctcaattggacaaaatgccagcacttccggctaaaggtaacttgaacctccgtgacatcttagagtcggacttcgcgttcgcg

SEQ ID NO: 138 - protein, 890 aa, synthetic construct
  REGION 1..890: note = Variant of RNA polymerase
MHHHHHHMNTINIAKNDFSDIELAAIPFNTLADHYGERLAREQLALEHESYEMGEARFRKMFERQLKAGEVADNAAAKPLITTLLPKMIARINDWFEEVKAKRGKRPTAFQFLQEIKPEAVAYITIKTTLACLTSADRTTVQAVASAIGRAIEDEARFGRIRDLEAKHFKKNVEEQLNKRVGHVYKKAFMQVVEADMLSKGLLGGEAWSSWHKEDSIHVGVRCIEMLIESTGMVSLHRQNAGVVGQDSETIELAPEYAEAIATRAGALAGISPMFQPCVVPPKPWTGITGGGYWANGRRPLALVRTHSKKGLMRYEDVYMPEVYKAINIAQNTAWSINKWVLAVANVITKWKHCPVRDIPAIEREELPMKPEDIDMNPEALGAWKRAKAAVYRRDKARKSRRILLEFMLEQANKFANHKAIWFPYNMDWRGRVYAVSMFNPQGNDMTKGLLTLAKGKPIGKEGYYWLKIHGANCAGVDKVPFPERIKFIEENHENIMACAKSPLENTWWAEQDLPFCFLAFCFEYAGVQHHGLSYNCSLPLAFDGSCSGIQHFSAMLRDEVGGRAVNLLPSETVQDIYGIVAKKVNEILQADAINGTDNEVVTVTDENTGEISEKVKLGTKALAGQWLAYGVTRSVTKRSVMTLAYGSKEFGFRQQVLEDTIQWAIDSGKGLMFTQPNQAAGYMAKLIWESVSVTVVAAVEAMNWLKSAAKLLAAEVKDKKTGEILRKRCAVHWVTPDGFPVWQEYKKPIQTRLNLMFLGQFRLQPTINTNKDSEIDAHKQESGIAPNFVHSQDGSHLRKTVVWAHEKYGIESFALIHDSFGTIPADAANLFKAVRETMVDTYESCDVLADFYDQFADQLHESQLDKMPALPAKGNLNLRDILESDFAFA

SEQ ID NO: 139 - DNA, 2670 bp, synthetic construct
  misc_feature 1..2670: note = Variant of RNA polymerase
  source 1..2670: mol_type = other DNA
atgcaccatcaccatcaccatatgaacacgattaacatcgctaagaacgacttctctgacatcgaactggctgctatcccgttcaacactctggctgaccattacggtgagcgtttagctcgcgaacagttggcccttgagcatgagtcttacgagatgggtgaagcacgcttccgcaagatgtttgagcgtcaacttaaagctggtgaggttgcggataacgctgccgccaagcctctcatcactaccctactccctaagatgattgcacgcatcaacgactggtttgaggaagtgaaagctaagcgcggcaagcgcccgacagccttccagttcctgcaagaaatcaagccggaagccgtagcgtacatcaccattaagaccactctggcttgcctaaccagtgcggaccgtacaaccgttcaggctgtagcaagcgcaatcggtcgggccattgaggacgaggctcgcttcggtcgtatccgtgaccttgaagctaagcacttcaagaaaaacgttgaggaacaactcaacaagcgcgtagggcacgtctacaagaaagcatttatgcaagttgtcgaggctgacatgctctctaagggtctactcggtggcgaggcgtggtcttcgtggcataaggaagactctattcatgtaggagtacgctgcatcgagatgctcattgagtcaaccggaatggttagcttacaccgccaaaatgctggcgtagtaggtcaagactctgagactatcgaactcgcacctgaatacgctgaggctatcgcaacccgtgcaggtgcgctggctggcatctctccgatgttccaaccttgcgtagttcctcctaagccgtggactggcattactggtggtggctattgggctaacggtcgtcgtcctctggcgctggtgcgtactcacagtaagaaaggtctgatgcgctacgaagacgtttacatgcctgaggtgtacaaagcgattaacattgcgcaaaacaccgcctggtcgatcaacaagtgggtcctggcggtcgccaacgtaatcaccaagtggaagcattgtccggtccgggacatccctgcgattgagcgtgaagaactcccgatgaaaccggaagacatcgacatgaatcctgaggctctcaccgcgtggaaacgtgctaaagctgctgtgtaccgcagagacaaggctcgcaagtctcgccgtatcttgcttgagttcatgcttgagcaagccaataagtttgctaaccataaggccatctggttcccttacaacatggactggcgcggtcgtgtttacgctgtgtcaatgttcaacccgcaaggtaacgatatgaccaaaggactgcttacgctggcgaaaggtaaaccaatcggtaaggaaggttactactggctgaaaatccacggtgcaaactgtgcgggtgtcgataaggttccgttccctgagcgcatcaagttcattgaggaaaaccacgagaacatcatggcttgcgctaagtctccactggagaacacttggtgggctgagcaagatctcccgttctgcttccttgcgttctgctttgagtacgctggggtacagcaccacggcctgagctataactgctcccttccgctggcgtttgacgggtcttgctctggcatccagcacttctccgcgatgctccgagatgaggtaggtggtcgcgcggttaacttgcttcctagtgaaaccgttcaggacatctacgggattgttgctaagaaagtcaacgagattctacaagcagacgcaatcaatgggaccgataacgaagtagttaccgtgaccgatgagaacactggtgaaatctctgagaaagtcaagctgggcactaaggcactggctggtcaatggctggcttacggtgttactcgcagtgtgactaagcgttcagtcatgacgctggcttacgggtccaaagagttcggcttccgtcaacaagtgctgagggatactattcagtgggctattgattccggcaagggtctgatgttcactcagccgaatcaggctgctggatacatggctaagctgatttgggaatctgtgagcgtgacggtggtagctgcggttgaagcaatgaactggcttaagtctgctgctaagctgctggctgctgaggtcaaagataagaagactggagagattcttcgcaagcgttgcgctgtgcattgggtaactcctgatggtttccctgtgtggcaggaatacaagaagcctattcagacgcgcttgaacctgatgttcctcggtcagttccgcttacagcctaccattaacaccaacaaagatagcgagattgatgcacacaaacaggagtctggtatcgctcctaactttgtacacagccaagacggtagccaccttcgtaagactgtagtgtgggcacacgagaagtacggaatcgaatcttttgcactgattcacgactccttcggtaccattccggctgacgctgcgaacctgttcaaagcagtgcgcgaaactatggttgacacatatgagtcttgtgatgtactggctgatttctacgaccagttcgctgaccagttgcacgagtctcaattggacaaaatgccagcacttccggctaaaggtaacttgaacctccgtgacatcttagagtcggacttcgcgttcgcg

SEQ ID NO: 140 - protein, 890 aa, synthetic construct
  REGION 1..890: note = Variant of RNA polymerase
MHHHHHHMNTINIAKNDFSDIELAAIPFNTLADHYGERLAREQLALEHESYEMGEARFRKMFERQLKAGEVADNAAAKPLITTLLPKMIARINDWFEEVKAKRGKRPTAFQFLQEIKPEAVAYITIKTTLACLTSADRTTVQAVASAIGRAIEDEARFGRIRDLEAKHFKKNVEEQLNKRVGHVYKKAFMQVVEADMLSKGLLGGEAWSSWHKEDSIHVGVRCIEMLIESTGMVSLHRQNAGVVGQDSETIELAPEYAEAIATRAGALAGISPMFQPCVVPPKPWTGITGGGYWANGRRPLALVRTHSKKGLMRYEDVYMPEVYKAINIAQNTAWSINKWVLAVANVITKWKHCPVRDIPAIEREELPMKPEDIDMNPEALTAWKRAKAAVYRRDKARKSRRILLEFMLEQANKFANHKAIWFPYNMDWRGRVYAVSMFNPQGNDMTKGLLTLAKGKPIGKEGYYWLKIHGANCAGVDKVPFPERIKFIEENHENIMACAKSPLENTWWAEQDLPFCFLAFCFEYAGVQHHGLSYNCSLPLAFDGSCSGIQHFSAMLRDEVGGRAVNLLPSETVQDIYGIVAKKVNEILQADAINGTDNEVVTVTDENTGEISEKVKLGTKALAGQWLAYGVTRSVTKRSVMTLAYGSKEFGFRQQVLRDTIQWAIDSGKGLMFTQPNQAAGYMAKLIWESVSVTVVAAVEAMNWLKSAAKLLAAEVKDKKTGEILRKRCAVHWVTPDGFPVWQEYKKPIQTRLNLMFLGQFRLQPTINTNKDSEIDAHKQESGIAPNFVHSQDGSHLRKTVVWAHEKYGIESFALIHDSFGTIPADAANLFKAVRETMVDTYESCDVLADFYDQFADQLHESQLDKMPALPAKGNLNLRDILESDFAFA

SEQ ID NO: 141 - DNA, 2670 bp, synthetic construct
  misc_feature 1..2670: note = Variant of RNA polymerase
  source 1..2670: mol_type = other DNA
atgcaccatcaccatcaccatatgaacacgattaacatcgctaagaacgacttctctgacatcgaactggctgctatcccgttcaacactctggctgaccattacggtgagcgtttagctcgcgaacagttggcccttgagcatgagtcttacgagatgcatgaagcacgcttccgcaagatgtttgagcgtcaacttaaagctggtgaggttgcggataacgctgccgccaagcctctcatcactaccctactccctaagatgattgcacgcatcaacgactggtttgaggaagtgaaagctaagcgcggcaagcgcccgacagccttccagttcctgcaagaaatcaagccggaagccgtagcgtacatcaccattaagaccactctggcttgcctaaccagtgcggaccgtacaaccgttcaggctgtagcaagcgcaatcggtcgggccattgaggacgaggctcgcttcggtcgtatccgtgaccttgaagctaagcacttcaagaaaaacgttgaggaacaactcaacaagcgcgtagggcacgtctacaagaaagcatttatgcaagttgtcgaggctgacatgctctctaagggtctactcggtggcgaggcgtggtcttcgtggcataaggaagactctattcatgtaggagtacgctgcatcgagatgctcattgagtcaaccggaatggttagcttacaccgccaaaatgctggcgtagtaggtcaagactctgagactatcgaactcgcacctgaatacgctgaggctatcgcaacccgtgcaggtgcgctggctggcatctctccgatgttccaaccttgcgtagttcctcctaagccgtggactggcattactggtggtggctattgggctaacggtcgtcgtcctctggcgctggtgcgtactcacagtaagaaaggtctgatgcgctacgaagacgtttacatgcctgaggtgtacaaagcgattaacattgcgcaaaacaccgcctggtcgatcaacaagtgggtcctggcggtcgccaacgtaatcaccaagtggaagcattgtccggtccgggacatccctgcgattgagcgtgaagaactcccgatgaaaccggaagacatcgacatgaatcctgaggctctcaccgcgtggaaacgtgctaaagctgctgtgtaccgcagagacaaggctcgcaagtctcgccgtatcttgcttgagttcatgcttgagcaagccaataagtttgctaaccataaggccatctggttcccttacaacatggactggcgcggtcgtgtttacgctgtgtcaatgttcaacccgcaaggtaacgatatgaccaaaggactgcttacgctggcgaaaggtaaaccaatcggtaaggaaggttactactggctgaaaatccacggtgcaaactgtgcgggtgtcgataaggttccgttccctgagcgcatcaagttcattgaggaaaaccacgagaacatcatggcttgcgctaagtctccactggagaacacttggtgggctgagcaagatctcccgttctgcttccttgcgttctgctttgagtacgctggggtacagcaccacggcctgagctataactgctcccttccgctggcgtttgacgggtcttgctctggcatccagcacttctccgcgatgctccgagatgaggtaggtggtcgcgcggttaacttgcttcctagtgaaaccgttcaggacatctacgggattgttgctaagaaagtcaacgagattctacaagcagacgcaatcaatgggaccgataacgaagtagttaccgtgaccgatgagaacactggtgaaatctctgagaaagtcaagctgggcactaaggcactggctggtcaatggctggcttacggtgttactcgcagtgtgactaagcgttcagtcatgacgctggcttacgggtccaaagagttcggcttccgtcaacaagtgctggaagatactattcagtgggctattgattccggcaagggtctgatgttcactcagccgaatcaggctgctggatacatggctaagctgatttgggaatctgtgagcgtgacggtggtagctgcggttgaagcaatgaactggcttaagtctgctgctaagctgctggctgctgaggtcaaagataagaagactggagagattcttcgcaagcgttgcgctgtgcattgggtaactcctgatggtttccctgtgtggcaggaatacaagaagcctattcagacgcgcttgaacctgatgttcctcggtcagttccgcttacagcctaccattaacaccaacaaagatagcgagattgatgcacacaaacaggagtctggtatcgctcctaactttgtacacagccaagacggtagccaccttcgtaagactgtagtgtgggcacacgagaagtacggaatcgaatcttttgcactgattcacgactccttcggtaccattccggctgacgctgcgaacctgttcaaagcagtgcgcgaaactatggttgacacatatgagtcttgtgatgtactggctgatttctacgaccagttcgctgaccagttgcacgagtctcaattggacaaaatgccagcacttccggctaaaggtaacttgaacctccgtgacatcttagagtcggacttcgcgttcgcg

SEQ ID NO: 142 - protein, 890 aa, synthetic construct
  REGION 1..890: note = Variant of RNA polymerase
MHHHHHHMNTINIAKNDFSDIELAAIPFNTLADHYGERLAREQLALEHESYEMHEARFRKMFERQLKAGEVADNAAAKPLITTLLPKMIARINDWFEEVKAKRGKRPTAFQFLQEIKPEAVAYITIKTTLACLTSADRTTVQAVASAIGRAIEDEARFGRIRDLEAKHFKKNVEEQLNKRVGHVYKKAFMQVVEADMLSKGLLGGEAWSSWHKEDSIHVGVRCIEMLIESTGMVSLHRQNAGVVGQDSETIELAPEYAEAIATRAGALAGISPMFQPCVVPPKPWTGITGGGYWANGRRPLALVRTHSKKGLMRYEDVYMPEVYKAINIAQNTAWSINKWVLAVANVITKWKHCPVRDIPAIEREELPMKPEDIDMNPEALTAWKRAKAAVYRRDKARKSRRILLEFMLEQANKFANHKAIWFPYNMDWRGRVYAVSMFNPQGNDMTKGLLTLAKGKPIGKEGYYWLKIHGANCAGVDKVPFPERIKFIEENHENIMACAKSPLENTWWAEQDLPFCFLAFCFEYAGVQHHGLSYNCSLPLAFDGSCSGIQHFSAMLRDEVGGRAVNLLPSETVQDIYGIVAKKVNEILQADAINGTDNEVVTVTDENTGEISEKVKLGTKALAGQWLAYGVTRSVTKRSVMTLAYGSKEFGFRQQVLEDTIQWAIDSGKGLMFTQPNQAAGYMAKLIWESVSVTVVAAVEAMNWLKSAAKLLAAEVKDKKTGEILRKRCAVHWVTPDGFPVWQEYKKPIQTRLNLMFLGQFRLQPTINTNKDSEIDAHKQESGIAPNFVHSQDGSHLRKTVVWAHEKYGIESFALIHDSFGTIPADAANLFKAVRETMVDTYESCDVLADFYDQFADQLHESQLDKMPALPAKGNLNLRDILESDFAFA

SEQ ID NO: 143 - DNA, 2670 bp, synthetic construct
  misc_feature 1..2670: note = Variant of RNA polymerase
  source 1..2670: mol_type = other DNA
atgcaccatcaccatcaccatatgaacacgattaacatcgctaagaacgacttctctgacatcgaactggctgctatcccgttcaacactctggctgaccattacggtgagcgtttagctcgcgaacagttggcccttgagcatgagtcttacgagatgggtgaagcacgcttccgcaagatgtttgagcgtcaacttaaagctggtgaggttgcggataacgctgccgccaagcctctcatcactaccctactccctaagatgattgcacgcatcaacgactggtttgaggaagtgaaagctaagcgcggcaagcgcccgacagccttccagttcctgcaagaaatcaagccggaagccgtagcgtacatcaccattaagaccactctggcttgcctaaccagtgcggaccgtacaaccgttcaggctgtagcaagcgcaatcggtcgggccattgaggacgaggctcgcttcggtcgtatccgtgaccttgaagctaagcacttcaagaaaaacgttgaggaacaactcaacaagcgcgtagggcacgtctacaagaaagcatttatgcaagttgtcgaggctgacatgctctctaagggtctactcggtggcgaggcgtggtcttcgtggcataaggaagactctattcatgtaggagtacgctgcatcgagatgctcattgagtcaaccggaatggttagcttacaccgccaaaatgctggcgtagtaggtcaagactctgagactatcgaactcgcacctgaatacgctgaggctatcgcaacccgtgcaggtgcgctggctggcatctctccgatgttccaaccttgcgtagttcctcctaagccgtggactggcattactggtggtggctattgggctaacggtcgtcgtcctctggcgctggtgcgtactcacagtaagaaaggtctgatgcgctacgaagacgtttacatgcctgaggtgtacaaagcgattaacattgcgcaaaacaccgcctggtcgatcaacaagtgggtcctggcggtcgccaacgtaatcaccaagtggaagcattgtccggtccgggacatccctgcgattgagcgtgaagaactcccgatgaaaccggaagacatcgacatgaatcctgaggctctcaccgcgtggaaacgtgctaaagctgctgtgtaccgcagagacaaggctcgcaagtctcgccgtatcttgcttgagttcatgcttgagcaagccaataagtttgctaaccattctgccatctggttcccttacaacatggactggcgcggtcgtgtttacgctgtgtcaatgttcaacccgcaaggtaacgatatgaccaaaggactgcttacgctggcgaaaggtaaaccaatcggtaaggaaggttactactggctgaaaatccacggtgcaaactgtgcgggtgtcgataaggttccgttccctgagcgcatcaagttcattgaggaaaaccacgagaacatcatggcttgcgctaagtctccactggagaacacttggtgggctgagcaagatctcccgttctgcttccttgcgttctgctttgagtacgctggggtacagcaccacggcctgagctataactgctcccttccgctggcgtttgacgggtcttgctctggcatccagcacttctccgcgatgctccgagatgaggtaggtggtcgcgcggttaacttgcttcctagtgaaaccgttcaggacatctacgggattgttgctaagaaagtcaacgagattctacaagcagacgcaatcaatgggaccgataacgaagtagttaccgtgaccgatgagaacactggtgaaatctctgagaaagtcaagctgggcactaaggcactggctggtcaatggctggcttacggtgttactcgcagtgtgactaagcgttcagtcatgacgctggcttacgggtccaaagagttcggcttccgtcaacaagtgctggaagatactattcagtgggctattgattccggcaagggtctgatgttcactcagccgaatcaggctgctggatacatggctaagctgatttgggaatctgtgagcgtgacggtggtagctgcggttgaagcaatgaactggcttaagtctgctgctaagctgctggctgctgaggtcaaagataagaagactggagagattcttcgcaagcgttgcgctgtgcattgggtaactcctgatggtttccctgtgtggcaggaatacaagaagcctattcagacgcgcttgaacctgatgttcctcggtcagttccgcttacagcctaccattaacaccaacaaagatagcgagattgatgcacacaaacaggagtctggtatcgctcctaactttgtacacagccaagacggtagccaccttcgtaagactgtagtgtgggcacacgagaagtacggaatcgaatcttttgcactgattcacgactccttcggtaccattccggctgacgctgcgaacctgttcaaagcagtgcgcgaaactatggttgacacatatgagtcttgtgatgtactggctgatttctacgaccagttcgctgaccagttgcacgagtctcaattggacaaaatgccagcacttccggctaaaggtaacttgaacctccgtgacatcttagagtcggacttcgcgttcgcg

SEQ ID NO: 144 - protein, 890 aa, synthetic construct
  REGION 1..890: note = Variant of RNA polymerase
MHHHHHHMNTINIAKNDFSDIELAAIPFNTLADHYGERLAREQLALEHESYEMGEARFRKMFERQLKAGEVADNAAAKPLITTLLPKMIARINDWFEEVKAKRGKRPTAFQFLQEIKPEAVAYITIKTTLACLTSADRTTVQAVASAIGRAIEDEARFGRIRDLEAKHFKKNVEEQLNKRVGHVYKKAFMQVVEADMLSKGLLGGEAWSSWHKEDSIHVGVRCIEMLIESTGMVSLHRQNAGVVGQDSETIELAPEYAEAIATRAGALAGISPMFQPCVVPPKPWTGITGGGYWANGRRPLALVRTHSKKGLMRYEDVYMPEVYKAINIAQNTAWSINKWVLAVANVITKWKHCPVRDIPAIEREELPMKPEDIDMNPEALTAWKRAKAAVYRRDKARKSRRILLEFMLEQANKFANHSAIWFPYNMDWRGRVYAVSMFNPQGNDMTKGLLTLAKGKPIGKEGYYWLKIHGANCAGVDKVPFPERIKFIEENHENIMACAKSPLENTWWAEQDLPFCFLAFCFEYAGVQHHGLSYNCSLPLAFDGSCSGIQHFSAMLRDEVGGRAVNLLPSETVQDIYGIVAKKVNEILQADAINGTDNEVVTVTDENTGEISEKVKLGTKALAGQWLAYGVTRSVTKRSVMTLAYGSKEFGFRQQVLEDTIQWAIDSGKGLMFTQPNQAAGYMAKLIWESVSVTVVAAVEAMNWLKSAAKLLAAEVKDKKTGEILRKRCAVHWVTPDGFPVWQEYKKPIQTRLNLMFLGQFRLQPTINTNKDSEIDAHKQESGIAPNFVHSQDGSHLRKTVVWAHEKYGIESFALIHDSFGTIPADAANLFKAVRETMVDTYESCDVLADFYDQFADQLHESQLDKMPALPAKGNLNLRDILESDFAFA

SEQ ID NO: 145 - DNA, 2670 bp, synthetic construct
  misc_feature 1..2670: note = Variant of RNA polymerase
  source 1..2670: mol_type = other DNA
atgcaccatcaccatcaccatatgaacacgattaacatcgctaagaacgacttctctgacatcgaactggctgctatcccgttcaacactctggctgaccattacggtgagcgtttagctcgcgaacagttggcccttgagcatgagtcttacgagatgggtgaagcacgtttccgcaagatgtttgagcgtcaacttaaagctggtgaggttgcggataacgctgccgccaagcctctcatcactaccctactccctaagatgattgcacgcatcaacgactggtttgaggaagtgaaagctaagcgcggcaagcgcccgacagccttccagttcctgcaagaaatcaagccggaagccgtagcgtacatcaccattaagaccactctggcttgcctaaccagtgcggaccgtacaaccgttcaggctgtagcaagcgcaatcggtcgggccattgaggacgaggctcgcttcggtcgtatccgtgaccttgaagctaagcacttcaaaaaagaatatgaggaacaactcaacaagcgcgtagggcacgtctacaagaaagcatttatgcaagttgtcgaggctgacatgctctctaagggtctactcggtggcgaggcgtggtcttcgtggcataaggaagactctattcatgtaggagtacgctgcatcgagatgctcattgagtcaaccggaatggttagcttacaccgccaaaatgctggcgtagtaggtcaagactctgagactatcgaactcgcacctgaatacgctgaggctatcgcaacccgtgcaggtgcgctggctggcatctctccgatgttccaaccttgcgtagttcctcctaagccgtggactggcattactggtggtggctattgggctaacggtcgtcgtcctctggcgctggtgcgtactcacagtaagaaaggtctgatgcgctacgaagacgtttacatgcctgaggtgtacaaagcgattaacattgcgcaaaacaccgcctggtcgatcaacaagtgggtcctggcggtcgccaacgtaatcaccaagtggaagcattgtccggtccgggacatccctgcgattgagcgtgaagaactcccgatgaaaccggaagacatcgacatgaatcctgaggctctcaccgcgtggaaacgtgctaaagctgctgtgtaccgcagagacaaggctcgcaagtctcgccgtatcttgcttgagttcatgcttgagcaagccaataagtttgctaaccataaggccatctggttcccttacaacatggactggcgcggtcgtgtttacgctgtgtcaatgttcaacccgcaaggtaacgatatgaccaaaggactgcttacgctggcgaaaggtaaaccaatcggtaaggaaggttactactggctgaaaatccacggtgcaaactgtgcgggtgtcgataaggttccgttccctgagcgcatcaagttcattgaggaaaaccacgagaacatcatggcttgcgctaagtctccactggagaacacttggtgggctgagcaagatagtccgttctgcttccttgcgttctgctttgagtacgctggggtacagcaccacggcctgagctataactgctcccttccgctggcgtttgacgggtcttgctctggcatccagcacttctccgcgatgctccgagatgaggtaggtggtcgcgcggttaacttgcttcctagtgaaaccgttcaggacatctacgggattgttgctaagaaagtcaacgagattctacaagcagacgcaatcaatgggaccgataacgaagtagttaccgtgaccgatgagaacactggtgaaatctctgagaaagtcaagctgggcactaaggcactggctggtcaatggctggcttacggtgttactcgcagtgtgactaagcgttcagtcatgacgctggcttacgggtccaaagagttcggcttccgtcaacaagtgctgcgccacactattcagtgggctattgattccggcaagggtctgatgttcactcagccgaatcaggctgctggatacatggctaagctgatttgggaatctgtgagcgtgacggtggtagctgcggttgaagcaatgaactggcttaagtctgctgctaagctgctggctgctgaggtcaaagataagaagactggagagattcttcgcaagcgttgcgctgtgcattgggtaactcctgatggtttccctgtgtggcaggaatacaagaagcctattcagacgcgcttgaacctgatgttcctcggtcagttccgcttacagcctaccattaacaccaacaaagatagcgagattgatgcacacaaacaggagtctggtatcgctcctaactttgtacacagccaagacggtagccaccttcgtaagactgtagtgtgggcacacgagaagtacggtatcgaatcttttgcactgattcacgactccttcggtaccattccggctgacgctgcgaacctgttcaaagcagtgcgcgaaactatggttgacacatatgagtcttgtgatgtactggctgatttctacgaccagttcgctgaccagttgcacgagtctcaattggacaaaatgccagcacttccggctaaaggtaacttgaacctccgtgacatcttagagtcggacttcgcgttcgcg

SEQ ID NO: 146 - protein, 890 aa, synthetic construct
  REGION 1..890: note = Variant of RNA polymerase
MHHHHHHMNTINIAKNDFSDIELAAIPFNTLADHYGERLAREQLALEHESYEMGEARFRKMFERQLKAGEVADNAAAKPLITTLLPKMIARINDWFEEVKAKRGKRPTAFQFLQEIKPEAVAYITIKTTLACLTSADRTTVQAVASAIGRAIEDEARFGRIRDLEAKHFKKEYEEQLNKRVGHVYKKAFMQVVEADMLSKGLLGGEAWSSWHKEDSIHVGVRCIEMLIESTGMVSLHRQNAGVVGQDSETIELAPEYAEAIATRAGALAGISPMFQPCVVPPKPWTGITGGGYWANGRRPLALVRTHSKKGLMRYEDVYMPEVYKAINIAQNTAWSINKWVLAVANVITKWKHCPVRDIPAIEREELPMKPEDIDMNPEALTAWKRAKAAVYRRDKARKSRRILLEFMLEQANKFANHKAIWFPYNMDWRGRVYAVSMFNPQGNDMTKGLLTLAKGKPIGKEGYYWLKIHGANCAGVDKVPFPERIKFIEENHENIMACAKSPLENTWWAEQDSPFCFLAFCFEYAGVQHHGLSYNCSLPLAFDGSCSGIQHFSAMLRDEVGGRAVNLLPSETVQDIYGIVAKKVNEILQADAINGTDNEVVTVTDENTGEISEKVKLGTKALAGQWLAYGVTRSVTKRSVMTLAYGSKEFGFRQQVLRHTIQWAIDSGKGLMFTQPNQAAGYMAKLIWESVSVTVVAAVEAMNWLKSAAKLLAAEVKDKKTGEILRKRCAVHWVTPDGFPVWQEYKKPIQTRLNLMFLGQFRLQPTINTNKDSEIDAHKQESGIAPNFVHSQDGSHLRKTVVWAHEKYGIESFALIHDSFGTIPADAANLFKAVRETMVDTYESCDVLADFYDQFADQLHESQLDKMPALPAKGNLNLRDILESDFAFA

SEQ ID NO: 147 - DNA, 2670 bp, synthetic construct
  misc_feature 1..2670: note = Variant of RNA polymerase
  source 1..2670: mol_type = other DNA
atgcaccatcaccatcaccatatgaacacgattaacatcgctaagaacgacttctctgacatcgaactggctgctatcccgttcaacactctggctgaccattacggtgagcgtttagctcgcgaacagttggcccttgagcatgagtcttacgagatgggtgaagcacgtttccgcaagatgtttgagcgtcaacttaaagctggtgaggttgcggataacgctgccgccaagcctctcatcactaccctactccctaagatgattgcacgcatcaacgactggtttgaggaagtgaaagctaagcgcggcaagcgcccgacagccttccagttcctgcaagaaatcaagccggaagccgtagcgtacatcaccattaagaccactctggcttgcctaaccagtgcggaccgtacaaccgttcaggctgtagcaagcgcaatcggtcgggccattgaggacgaggctcgcttcggtcgtatccgtgaccttgaagctaagcacttccaagaagaagttgaggaacaactcaacaagcgcgtagggcacgtctacaagaaagcatttatgcaagttgtcgaggctgacatgctctctaagggtctactcggtggcgaggcgtggtcttcgtggcataaggaagactctattcatgtaggagtacgctgcatcgagatgctcattgagtcaaccggaatggttagcttacaccgccaaaatgctggcgtagtaggtcaagactctgagactatcgaactcgcacctgaatacgctgaggctatcgcaacccgtgcaggtgcgctggctggcatctctccgatgttccaaccttgcgtagttcctcctaagccgtggactggcattactggtggtggctattgggctaacggtcgtcgtcctctggcgctggtgcgtactcacagtaagaaaggtctgatgcgctacgaagacgtttacatgcctgaggtgtacaaagcgattaacattgcgcaaaacaccgcctggtcgatcaacaagtgggtcctggcggtcgccaacgtaatcaccaagtggaagcattgtccggtccgggacatccctgcgattgagcgtgaagaactcccgatgaaaccggaagacatcgacatgaatcctgaggctctcaccgcgtggaaacgtgctaaagctgctgtgtaccgcagagacaaggctcgcaagtctcgccgtatcttgcttgagttcatgcttgagcaagccaataagtttgctaaccataaggccatctggttcccttacaacatggactggcgcggtcgtgtttacgctgtgtcaatgttcaacccgcaaggtaacgatatgaccaaaggactgcttacgctggcgaaaggtaaaccaatcggtaaggaaggttactactggctgaaaatccacggtgcaaactgtgcgggtgtcgataaggttccgttccctgagcgcatcaagttcattgaggaaaaccacgagaacatcatggcttgcgctaagtctccactggagaacacttggtgggctgagcaagatagtccgttctgcttccttgcgttctgctttgagtacgctggggtacagcaccacggcctgagctataactgctcccttccgctggcgtttgacgggtcttgctctggcatccagcacttctccgcgatgctccgagatgaggtaggtggtcgcgcggttaacttgcttcctagtgaaaccgttcaggacatctacgggattgttgctaagaaagtcaacgagattctacaagcagacgcaatcaatgggaccgataacgaagtagttaccgtgaccgatgagaacactggtgaaatctctgagaaagtcaagctgggcactaaggcactggctggtcaatggctggcttacggtgttactcgcagtgtgactaagcgttcagtcatgacgctggcttacgggtccaaagagttcggcttccgtcaacaagtgctgcgcgacactattcagtgggctattgattccggcaagggtctgatgttcactcagccgaatcaggctgctggatacatggctaagctgatttgggaatctgtgagcgtgacggtggtagctgcggttgaagcaatgaactggcttaagtctgctgctaagctgctggctgctgaggtcaaagataagaagactggagagattcttcgcaagcgttgcgctgtgcattgggtaactcctgatggtttccctgtgtggcaggaatacaagaagcctattcagacgcgcttgaacctgatgttcctcggtcagttccgcttacagcctaccattaacaccaacaaagatagcgagattgatgcacacaaacaggagtctggtatcgctcctaactttgtacacagccaagacggtagccaccttcgtaagactgtagtgtgggcacacgagaagtacggtatcgaatcttttgcactgattcacgactccttcggtaccattccggctgacgctgcgaacctgttcaaagcagtgcgcgaaactatggttgacacatatgagtcttgtgatgtactggctgatttctacgaccagttcgctgaccagttgcacgagtctcaattggacaaaatgccagcacttccggctaaaggtaacttgaacctccgtgacatcttagagtcggacttcgcgttcgcg

SEQ ID NO: 148 - protein, 890 aa, synthetic construct
  REGION 1..890: note = Variant of RNA polymerase
MHHHHHHMNTINIAKNDFSDIELAAIPFNTLADHYGERLAREQLALEHESYEMGEARFRKMFERQLKAGEVADNAAAKPLITTLLPKMIARINDWFEEVKAKRGKRPTAFQFLQEIKPEAVAYITIKTTLACLTSADRTTVQAVASAIGRAIEDEARFGRIRDLEAKHFQEEVEEQLNKRVGHVYKKAFMQVVEADMLSKGLLGGEAWSSWHKEDSIHVGVRCIEMLIESTGMVSLHRQNAGVVGQDSETIELAPEYAEAIATRAGALAGISPMFQPCVVPPKPWTGITGGGYWANGRRPLALVRTHSKKGLMRYEDVYMPEVYKAINIAQNTAWSINKWVLAVANVITKWKHCPVRDIPAIEREELPMKPEDIDMNPEALTAWKRAKAAVYRRDKARKSRRILLEFMLEQANKFANHKAIWFPYNMDWRGRVYAVSMFNPQGNDMTKGLLTLAKGKPIGKEGYYWLKIHGANCAGVDKVPFPERIKFIEENHENIMACAKSPLENTWWAEQDSPFCFLAFCFEYAGVQHHGLSYNCSLPLAFDGSCSGIQHFSAMLRDEVGGRAVNLLPSETVQDIYGIVAKKVNEILQADAINGTDNEVVTVTDENTGEISEKVKLGTKALAGQWLAYGVTRSVTKRSVMTLAYGSKEFGFRQQVLRDTIQWAIDSGKGLMFTQPNQAAGYMAKLIWESVSVTVVAAVEAMNWLKSAAKLLAAEVKDKKTGEILRKRCAVHWVTPDGFPVWQEYKKPIQTRLNLMFLGQFRLQPTINTNKDSEIDAHKQESGIAPNFVHSQDGSHLRKTVVWAHEKYGIESFALIHDSFGTIPADAANLFKAVRETMVDTYESCDVLADFYDQFADQLHESQLDKMPALPAKGNLNLRDILESDFAFA

SEQ ID NO: 149 - DNA, 2670 bp, synthetic construct
  misc_feature 1..2670: note = Variant of RNA polymerase
  source 1..2670: mol_type = other DNA
atgcaccatcaccatcaccatatgaacacgattaacatcgctaagaacgacttctctgacatcgaactggctgctatcccgttcaacactctggctgaccattacggtgagcgtttagctcgcgaacagttggcccttgagcatgagtcttacgagatgggtgaagcacgtttccgcaagatgtttgagcgtcaacttaaagctggtgaggttgcggataacgctgccgccaagcctctcatcactaccctactccctaagatgattgcacgcatcaacgactggtttgaggaagtgaaagctaagcgcggcaagcgcccgacagccttccagttcctgcaagaaatcaagccggaagccgtagcgtacatcaccattaagaccactctggcttgcctaaccagtgcggaccgtacaaccgttcaggctgtagcaagcgcaatcggtcgggccattgaggacgaggctcgcttcggtcgtatccgtgaccttgaagctaagcacttcaagaaaaactatgaggaacaactcaacaagcgcgtagggcacgtctacaagaaagcatttatgcaagttgtcgaggctgacatgctctctaagggtctactcggtggcgaggcgtggtcttcgtggcataaggaagactctattcatgtaggagtacgctgcatcgagatgctcattgagtcaaccggaatggttagcttacaccgccaaaatgctggcgtagtaggtcaagactctgagactatcgaactcgcacctgaatacgctgaggctatcgcaacccgtgcaggtgcgctggctggcatctctccgatgttccaaccttgcgtagttcctcctaagccgtggactggcattactggtggtggctattgggctaacggtcgtcgtcctctggcgctggtgcgtactcacagtaagaaaggtctgatgcgctacgaagacgtttacatgcctgaggtgtacaaagcgattaacattgcgcaaaacaccgcctggtcgatcaacaagtgggtcctggcggtcgccaacgtaatcaccaagtggaagcattgtccggtccgggacatccctgcgattgagcgtgaagaactcccgatgaaaccggaagacatcgacatgaatcctgaggctctcaccgcgtggaaacgtgctaaagctgctgtgtaccgcagagacaaggctcgcaagtctcgccgtatcttgcttgagttcatgcttgagcaagccaataagtttgctaaccataaggccatctggttcccttacaacatggactggcgcggtcgtgtttacgctgtgtcaatgttcaacccgcaaggtaacgatatgaccaaaggactgcttacgctggcgaaaggtaaaccaatcggtaaggaaggttactactggctgaaaatccacggtgcaaactgtgcgggtgtcgataaggttccgttccctgagcgcatcaagttcattgaggaaaaccacgagaacatcatggcttgcgctaagtctccactggagaacacttggtgggctgagcaagatagtccgttctgcttccttgcgttctgctttgagtacgctggggtacagcaccacggcctgagctataactgctcccttccgctggcgtttgacgggtcttgctctggcatccagcacttctccgcgatgctccgagatgaggtaggtggtcgcgcggttaacttgcttcctagtgaaaccgttcaggacatctacgggattgttgctaagaaagtcaacgagattctacaagcagacgcaatcaatgggaccgataacgaagtagttaccgtgaccgatgagaacactggtgaaatctctgagaaagtcaagctgggcactaaggcactggctggtcaatggctggcttacggtgttactcgcagtgtgactaagcgttcagtcatgacgctggcttacgggtccaaagagttcggcttccgtcaacaagtgctgcgccacactattcagtgggctattgattccggcaagggtctgatgttcactcagccgaatcaggctgctggatacatggctaagctgatttgggaatctgtgagcgtgacggtggtagctgcggttgaagcaatgaactggcttaagtctgctgctaagctgctggctgctgaggtcaaagataagaagactggagagattcttcgcaagcgttgcgctgtgcattgggtaactcctgatggtttccctgtgtggcaggaatacaagaagcctattcagacgcgcttgaacctgatgttcctcggtcagttccgcttacagcctaccattaacaccaacaaagatagcgagattgatgcacacaaacaggagtctggtatcgctcctaactttgtacacagccaagacggtagccaccttcgtaagactgtagtgtgggcacacgagaagtacggaatcgaatcttttgcactgattcacgactccttcggtaccattccggctgacgctgcgaacctgttcaaagcagtgcgcgaaactatggttgacacatatgagtcttgtgatgtactggctgatttctacgaccagttcgctgaccagttgcacgagtctcaattggacaaaatgccagcacttccggctaaaggtaacttgaacctccgtgacatcttagagtcggacttcgcgttcgcg

SEQ ID NO: 150 - protein, 890 aa, synthetic construct
  REGION 1..890: note = Variant of RNA polymerase
MHHHHHHMNTINIAKNDFSDIELAAIPFNTLADHYGERLAREQLALEHESYEMGEARFRKMFERQLKAGEVADNAAAKPLITTLLPKMIARINDWFEEVKAKRGKRPTAFQFLQEIKPEAVAYITIKTTLACLTSADRTTVQAVASAIGRAIEDEARFGRIRDLEAKHFKKNYEEQLNKRVGHVYKKAFMQVVEADMLSKGLLGGEAWSSWHKEDSIHVGVRCIEMLIESTGMVSLHRQNAGVVGQDSETIELAPEYAEAIATRAGALAGISPMFQPCVVPPKPWTGITGGGYWANGRRPLALVRTHSKKGLMRYEDVYMPEVYKAINIAQNTAWSINKWVLAVANVITKWKHCPVRDIPAIEREELPMKPEDIDMNPEALTAWKRAKAAVYRRDKARKSRRILLEFMLEQANKFANHKAIWFPYNMDWRGRVYAVSMFNPQGNDMTKGLLTLAKGKPIGKEGYYWLKIHGANCAGVDKVPFPERIKFIEENHENIMACAKSPLENTWWAEQDSPFCFLAFCFEYAGVQHHGLSYNCSLPLAFDGSCSGIQHFSAMLRDEVGGRAVNLLPSETVQDIYGIVAKKVNEILQADAINGTDNEVVTVTDENTGEISEKVKLGTKALAGQWLAYGVTRSVTKRSVMTLAYGSKEFGFRQQVLRHTIQWAIDSGKGLMFTQPNQAAGYMAKLIWESVSVTVVAAVEAMNWLKSAAKLLAAEVKDKKTGEILRKRCAVHWVTPDGFPVWQEYKKPIQTRLNLMFLGQFRLQPTINTNKDSEIDAHKQESGIAPNFVHSQDGSHLRKTVVWAHEKYGIESFALIHDSFGTIPADAANLFKAVRETMVDTYESCDVLADFYDQFADQLHESQLDKMPALPAKGNLNLRDILESDFAFA

SEQ ID NO: 151 - DNA, 2670 bp, synthetic construct
  misc_feature 1..2670: note = Variant of RNA polymerase
  source 1..2670: mol_type = other DNA
atgcaccatcaccatcaccatatgaacacgattaacatcgctaagaacgacttctctgacatcgaactggctgctatcccgttcaacactctggctgaccattacggtgagcgtttagctcgcgaacagttggcccttgagcatgagtcttacgagatgggtgaagcacgtttccgcaagatgtttgagcgtcaacttaaagctggtgaggttgcggataacgctgccgccaagcctctcatcactaccctactccctaagatgattgcacgcatcaacgactggtttgaggaagtgaaagctaagcgcggcaagcgcccgacagccttccagttcctgcaagaaatcaagccggaagccgtagcgtacatcaccattaagaccactctggcttgcctaaccagtgcggaccgtacaaccgttcaggctgtagcaagcgcaatcggtcgggccattgaggacgaggctcgcttcggtcgtatccgtgaccttgaagctaagcacttcaaaaaaaactatgaggaacaactcaacaagcgcgtagggcacgtctacaagaaagcatttatgcaagttgtcgaggctgacatgctctctaagggtctactcggtggcgaggcgtggtcttcgtggcataaggaagactctattcatgtaggagtacgctgcatcgagatgctcattgagtcaaccggaatggttagcttacaccgccaaaatgctggcgtagtaggtcaagactctgagactatcgaactcgcacctgaatacgctgaggctatcgcaacccgtgcaggtgcgctggctggcatctctccgatgttccaaccttgcgtagttcctcctaagccgtggactggcattactggtggtggctattgggctaacggtcgtcgtcctctggcgctggtgcgtactcacagtaagaaaggtctgatgcgctacgaagacgtttacatgcctgaggtgtacaaagcgattaacattgcgcaaaacaccgcctggtcgatcaacaagtgggtcctggcggtcgccaacgtaatcaccaagtggaagcattgtccggtccgggacatccctgcgattgagcgtgaagaactcccgatgaaaccggaagacatcgacatgaatcctgaggctctcaccgcgtggaaacgtgctaaagctgctgtgtaccgcagagacaaggctcgcaagtctcgccgtatcttgcttgagttcatgcttgagcaagccaataagtttgctaaccataaggccatctggttcccttacaacatggactggcgcggtcgtgtttacgctgtgtcaatgttcaacccgcaaggtaacgatatgaccaaaggactgcttacgctggcgaaaggtaaaccaatcggtaaggaaggttactactggctgaaaatccacggtgcaaactgtgcgggtgtcgataaggttccgttccctgagcgcatcaagttcattgaggaaaaccacgagaacatcatggcttgcgctaagtctccactggagaacacttggtgggctgagcaagatagtccgttctgcttccttgcgttctgctttgagtacgctggggtacagcaccacggcctgagctataactgctcccttccgctggcgtttgacgggtcttgctctggcatccagcacttctccgcgatgctccgagatgaggtaggtggtcgcgcggttaacttgcttcctagtgaaaccgttcaggacatctacgggattgttgctaagaaagtcaacgagattctacaagcagacgcaatcaatgggaccgataacgaagtagttaccgtgaccgatgagaacactggtgaaatctctgagaaagtcaagctgggcactaaggcactggctggtcaatggctggcttacggtgttactcgcagtgtgactaagcgttcagtcatgacgctggcttacgggtccaaagagttcggcttccgtcaacaagtgctgcgcgacactattcagtgggctattgattccggcaagggtctgatgttcactcagccgaatcaggctgctggatacatggctaagctgatttgggaatctgtgagcgtgacggtggtagctgcggttgaagcaatgaactggcttaagtctgctgctaagctgctggctgctgaggtcaaagataagaagactggagagattcttcgcaagcgttgcgctgtgcattgggtaactcctgatggtttccctgtgtggcaggaatacaagaagcctattcagacgcgcttgaacctgatgttcctcggtcagttccgcttacagcctaccattaacaccaacaaagatagcgagattgatgcacacaaacaggagtctggtatcgctcctaactttgtacacagccaagacggtagccaccttcgtaagactgtagtgtgggcacacgagaagtacaagatcgaatcttttgcactgattcacgactccttcggtaccattccggctgacgctgcgaacctgttcaaagcagtgcgcgaaactatggttgacacatatgagtcttgtgatgtactggctgatttctacgaccagttcgctgaccagttgcacgagtctcaattggacaaaatgccagcacttccggctaaaggtaacttgaacctccgtgacatcttagagtcggacttcgcgttcgcg

SEQ ID NO: 152 - protein, 890 aa, synthetic construct
  REGION 1..890: note = Variant of RNA polymerase
MHHHHHHMNTINIAKNDFSDIELAAIPFNTLADHYGERLAREQLALEHESYEMGEARFRKMFERQLKAGEVADNAAAKPLITTLLPKMIARINDWFEEVKAKRGKRPTAFQFLQEIKPEAVAYITIKTTLACLTSADRTTVQAVASAIGRAIEDEARFGRIRDLEAKHFKKNYEEQLNKRVGHVYKKAFMQVVEADMLSKGLLGGEAWSSWHKEDSIHVGVRCIEMLIESTGMVSLHRQNAGVVGQDSETIELAPEYAEAIATRAGALAGISPMFQPCVVPPKPWTGITGGGYWANGRRPLALVRTHSKKGLMRYEDVYMPEVYKAINIAQNTAWSINKWVLAVANVITKWKHCPVRDIPAIEREELPMKPEDIDMNPEALTAWKRAKAAVYRRDKARKSRRILLEFMLEQANKFANHKAIWFPYNMDWRGRVYAVSMFNPQGNDMTKGLLTLAKGKPIGKEGYYWLKIHGANCAGVDKVPFPERIKFIEENHENIMACAKSPLENTWWAEQDSPFCFLAFCFEYAGVQHHGLSYNCSLPLAFDGSCSGIQHFSAMLRDEVGGRAVNLLPSETVQDIYGIVAKKVNEILQADAINGTDNEVVTVTDENTGEISEKVKLGTKALAGQWLAYGVTRSVTKRSVMTLAYGSKEFGFRQQVLRDTIQWAIDSGKGLMFTQPNQAAGYMAKLIWESVSVTVVAAVEAMNWLKSAAKLLAAEVKDKKTGEILRKRCAVHWVTPDGFPVWQEYKKPIQTRLNLMFLGQFRLQPTINTNKDSEIDAHKQESGIAPNFVHSQDGSHLRKTVVWAHEKYKIESFALIHDSFGTIPADAANLFKAVRETMVDTYESCDVLADFYDQFADQLHESQLDKMPALPAKGNLNLRDILESDFAFA

SEQ ID NO: 153 - DNA, 2670 bp, synthetic construct
  misc_feature 1..2670: note = Variant of RNA polymerase
  source 1..2670: mol_type = other DNA
atgcaccatcaccatcaccatatgaacacgattaacatcgctaagaacgacttctctgacatcgaactggctgctatcccgttcaacactctggctgaccattacggtgagcgtttagctcgcgaacagttggcccttgagcatgagtcttacgagatgggtgaagcacgtttccgcaagatgtttgagcgtcaacttaaagctggtgaggttgcggataacgctgccgccaagcctctcatcactaccctactccctaagatgattgcacgcatcaacgactggtttgaggaagtgaaagctaagcgcggcaagcgcccgacagccttccagttcctgcaagaaatcaagccggaagccgtagcgtacatcaccattaagaccactctggcttgcctaaccagtgcggaccgtacaaccgttcaggctgtagcaagcgcaatcggtcgggccattgaggacgaggctcgcttcggtcgtatccgtgaccttgaagctaagcacttccaaaaaaacgttgaggaacaactcaacaagcgcgtagggcacgtctacaagaaagcatttatgcaagttgtcgaggctgacatgctctctaagggtctactcggtggcgaggcgtggtcttcgtggcataaggaagactctattcatgtaggagtacgctgcatcgagatgctcattgagtcaaccggaatggttagcttacaccgccaaaatgctggcgtagtaggtcaagactctgagactatcgaactcgcacctgaatacgctgaggctatcgcaacccgtgcaggtgcgctggctggcatctctccgatgttccaaccttgcgtagttcctcctaagccgtggactggcattactggtggtggctattgggctaacggtcgtcgtcctctggcgctggtgcgtactcacagtaagaaaggtctgatgcgctacgaagacgtttacatgcctgaggtgtacaaagcgattaacattgcgcaaaacaccgcctggtcgatcaacaagaaagtcctggcggtcgccaacgtaatcaccaagtggaagcattgtccggtccgggacatccctgcgattgagcgtgaagaactcccgatgaaaccggaagacatcgacatgaatcctgaggctctcaccgcgtggaaacgtgctaaagctgctgtgtaccgcagagacaaggctcgcaagtctcgccgtatcttgcttgagttcatgcttgagcaagccaataagtttgctaaccataaggccatctggttcccttacaacatggactggcgcggtcgtgtttacgctgtgtcaatgttcaacccgcaaggtaacgatatgaccaaaggactgcttacgctggcgaaaggtaaaccaatcggtaaggaaggttactactggctgaaaatccacggtgcaaactgtgcgggtgtcgataaggttccgttccctgagcgcatcaagttcattgaggaaaaccacgagaacatcatggcttgcgctaagtctccactggagaacacttggtgggctgagcaagatagtccgttctgcttccttgcgttctgctttgagtacgctggggtacagcaccacggcctgagctataactgctcccttccgctggcgtttgacgggtcttgctctggcatccagcacttctccgcgatgctccgagatgaggtaggtggtcgcgcggttaacttgcttcctagtgaaaccgttcaggacatctacgggattgttgctaagaaagtcaacgagattctacaagcagacgcaatcaatgggaccgataacgaagtagttaccgtgaccgatgagaacactggtgaaatctctgagaaagtcaagctgggcactaaggcactggctggtcaatggctggcttacggtgttactcgcagtgtgactaagcgttcagtcatgacgctggcttacgggtccaaagagttcggcttccgtcaacaagtgctgcgccacactattcagtgggctattgattccggcaagggtctgatgttcactcagccgaatcaggctgctggatacatggctaagctgatttgggaatctgtgagcgtgacggtggtagctgcggttgaagcaatgaactggcttaagtctgctgctaagctgctggctgctgaggtcaaagataagaagactggagagattcttcgcaagcgttgcgctgtgcattgggtaactcctgatggtttccctgtgtggcaggaatacaagaagcctattcagacgcgcttgaacctgatgttcctcggtcagttccgcttacagcctaccattaacaccaacaaagatagcgagattgatgcacacaaacaggagtctggtatcgctcctaactttgtacacagccaagacggtagccaccttcgtaagactgtagtgtgggcacacgagaagtacaagatcgaatcttttgcactgattcacgactccttcggtaccattccggctgacgctgcgaacctgttcaaagcagtgcgcgaaactatggttgacacatatgagtcttgtgatgtactggctgatttctacgaccagttcgctgaccagttgcacgagtctcaattggacaaaatgccagcacttccggctaaaggtaacttgaacctccgtgacatcttagagtcggacttcgcgttcgcg

SEQ ID NO: 154 - protein, 890 aa, synthetic construct
  REGION 1..890: note = Variant of RNA polymerase
MHHHHHHMNTINIAKNDFSDIELAAIPFNTLADHYGERLAREQLALEHESYEMGEARFRKMFERQLKAGEVADNAAAKPLITTLLPKMIARINDWFEEVKAKRGKRPTAFQFLQEIKPEAVAYITIKTTLACLTSADRTTVQAVASAIGRAIEDEARFGRIRDLEAKHFQKNVEEQLNKRVGHVYKKAFMQVVEADMLSKGLLGGEAWSSWHKEDSIHVGVRCIEMLIESTGMVSLHRQNAGVVGQDSETIELAPEYAEAIATRAGALAGISPMFQPCVVPPKPWTGITGGGYWANGRRPLALVRTHSKKGLMRYEDVYMPEVYKAINIAQNTAWSINKKVLAVANVITKWKHCPVRDIPAIEREELPMKPEDIDMNPEALTAWKRAKAAVYRRDKARKSRRILLEFMLEQANKFANHKAIWFPYNMDWRGRVYAVSMFNPQGNDMTKGLLTLAKGKPIGKEGYYWLKIHGANCAGVDKVPFPERIKFIEENHENIMACAKSPLENTWWAEQDSPFCFLAFCFEYAGVQHHGLSYNCSLPLAFDGSCSGIQHFSAMLRDEVGGRAVNLLPSETVQDIYGIVAKKVNEILQADAINGTDNEVVTVTDENTGEISEKVKLGTKALAGQWLAYGVTRSVTKRSVMTLAYGSKEFGFRQQVLRHTIQWAIDSGKGLMFTQPNQAAGYMAKLIWESVSVTVVAAVEAMNWLKSAAKLLAAEVKDKKTGEILRKRCAVHWVTPDGFPVWQEYKKPIQTRLNLMFLGQFRLQPTINTNKDSEIDAHKQESGIAPNFVHSQDGSHLRKTVVWAHEKYKIESFALIHDSFGTIPADAANLFKAVRETMVDTYESCDVLADFYDQFADQLHESQLDKMPALPAKGNLNLRDILESDFAFA

SEQ ID NO: 155 - DNA, 2670 bp, synthetic construct
  misc_feature 1..2670: note = Variant of RNA polymerase
  source 1..2670: mol_type = other DNA
atgcaccatcaccatcaccatatgaacacgattaacatcgctaagaacgacttctctgacatcgaactggctgctatcccgttcaacactctggctgaccattacggtgagcgtttagctcgcgaacagttggcccttgagcatgagtcttacgagatgggtgaagcacgcttccgcaagatgtttgagcgtcaacttaaagctggtgaggttgcggataacgctgccgccaagcctctcatcactaccctactccctaagatgattgcacgcatcaacgactggtttgaggaagtgaaagctaagcgcggcaagcgcccgacagccttccagttcctgcaagaaatcaagccggaagccgtagcgtacatcaccattaagaccactctggcttgcctaaccagtgcggaccgtacaaccgttcaggctgtagcaagcgcaatcggtcgggccattgaggacgaggctcgcttcggtcgtatccgtgaccttgaagctaagcacttccaagaaaactatgaggaacaactcaacaagcgcgtagggcacgtctacaagaaagcatttatgcaagttgtcgaggctgacatgctctctaagggtctactcggtggcgaggcgtggtcttcgtggcataaggaagactctattcatgtaggagtacgctgcatcgagatgctcattgagtcaaccggaatggttagcttacaccgccaaaatgctggcgtagtaggtcaagactctgagactatcgaactcgcacctgaatacgctgaggctatcgcaacccgtgcaggtgcgctggctggcatctctccgatgttccaaccttgcgtagttcctcctaagccgtggactggcattactggtggtggctattgggctaacggtcgtcgtcctctggcgctggtgcgtactcacagtaagaaaggtctgatgcgctacgaagacgtttacatgcctgaggtgtacaaagcgattaacattgcgcaaaacaccgcctggaagatcaacaagaaagtcctggcggtcgccaacgtaatcaccaagtggaagcattgtccggtccgggacatccctgcgattgagcgtgaagaactcccgatgaaaccggaagacatcgacatgaatcctgaggctctcaccgcgtggaaacgtgctaaagctgctgtgtaccgcagagacaaggctcgcaagtctcgccgtatcttgcttgagttcatgcttgagcaagccaataagtttgctaaccataaggccatctggttcccttacaacatggactggcgcggtcgtgtttacgctgtgtcaatgttcaacccgcaaggtaacgatatgaccaaaggactgcttacgctggcgaaaggtaaaccaatcggtaaggaaggttactactggctgaaaatccacggtgcaaactgtgcgggtgtcgataaggttccgttccctgagcgcatcaagttcattgaggaaaaccacgagaacatcatggcttgcgctaagtctccactggagaacacttggtgggctgagcaagatagtccgttctgcttccttgcgttctgctttgagtacgctggggtacagcaccacggcctgagctataactgctcccttccgctggcgtttgacgggtcttgctctggcatccagcacttctccgcgatgctccgagatgaggtaggtggtcgcgcggttaacttgcttcctagtgaaaccgttcaggacatctacgggattgttgctaagaaagtcaacgagattctacaagcagacgcaatcaatgggaccgataacgaagtagttaccgtgaccgatgagaacactggtgaaatctctgagaaagtcaagctgggcactaaggcactggctggtcaatggctggcttacggtgttactcgcagtgtgactaagcgttcagtcatgacgctggcttacgggtccaaagagttcggcttccgtcaacaagtgctgcgccacactattcagtgggctattgattccggcaagggtctgatgttcactcagccgaatcaggctgctggatacatggctaagctgatttgggaatctgtgagcgtgacggtggtagctgcggttgaagcaatgaactggcttaagtctgctgctaagctgctggctgctgaggtcaaagataagaagactggagagattcttcgcaagcgttgcgctgtgcattgggtaactcctgatggtttccctgtgtggcaggaatacaagaagcctattcagacgcgcttgaacctgatgttcctcggtcagttccgcttacagcctaccattaacaccaacaaagatagcgagattgatgcacacaaacaggagtctggtatcgctcctaactttgtacacagccaagacggtagccaccttcgtaagactgtagtgtgggcacacgagaagtacggtatcgaatcttttgcactgattcacgactccttcggtaccattccggctgacgctgcgaacctgttcaaagcagtgcgcgaaactatggttgacacatatgagtcttgtgatgtactggctgatttctacgaccagttcgctgaccagttgcacgagtctcaattggacaaaatgccagcacttccggctaaaggtaacttgaacctccgtgacatcttagagtcggacttcgcgttcgcg

SEQ ID NO: 156 - protein, 890 aa, synthetic construct
  REGION 1..890: note = Variant of RNA polymerase
MHHHHHHMNTINIAKNDFSDIELAAIPFNTLADHYGERLAREQLALEHESYEMGEARFRKMFERQLKAGEVADNAAAKPLITTLLPKMIARINDWFEEVKAKRGKRPTAFQFLQEIKPEAVAYITIKTTLACLTSADRTTVQAVASAIGRAIEDEARFGRIRDLEAKHFQENYEEQLNKRVGHVYKKAFMQVVEADMLSKGLLGGEAWSSWHKEDSIHVGVRCIEMLIESTGMVSLHRQNAGVVGQDSETIELAPEYAEAIATRAGALAGISPMFQPCVVPPKPWTGITGGGYWANGRRPLALVRTHSKKGLMRYEDVYMPEVYKAINIAQNTAWKINKKVLAVANVITKWKHCPVRDIPAIEREELPMKPEDIDMNPEALTAWKRAKAAVYRRDKARKSRRILLEFMLEQANKFANHKAIWFPYNMDWRGRVYAVSMFNPQGNDMTKGLLTLAKGKPIGKEGYYWLKIHGANCAGVDKVPFPERIKFIEENHENIMACAKSPLENTWWAEQDSPFCFLAFCFEYAGVQHHGLSYNCSLPLAFDGSCSGIQHFSAMLRDEVGGRAVNLLPSETVQDIYGIVAKKVNEILQADAINGTDNEVVTVTDENTGEISEKVKLGTKALAGQWLAYGVTRSVTKRSVMTLAYGSKEFGFRQQVLRHTIQWAIDSGKGLMFTQPNQAAGYMAKLIWESVSVTVVAAVEAMNWLKSAAKLLAAEVKDKKTGEILRKRCAVHWVTPDGFPVWQEYKKPIQTRLNLMFLGQFRLQPTINTNKDSEIDAHKQESGIAPNFVHSQDGSHLRKTVVWAHEKYGIESFALIHDSFGTIPADAANLFKAVRETMVDTYESCDVLADFYDQFADQLHESQLDKMPALPAKGNLNLRDILESDFAFA

SEQ ID NO: 157 - DNA, 2670 bp, synthetic construct
  misc_feature 1..2670: note = Variant of RNA polymerase
  source 1..2670: mol_type = other DNA
atgcaccatcaccatcaccatatgaacacgattaacatcgctaagaacgacttctctgacatcgaactggctgctatcccgttcaacactctggctgaccattacggtgagcgtttagctcgcgaacagttggcccttgagcatgagtcttacgagatgggtgaagcaggtttccgcaagatgtttgagcgtcaacttaaagctggtgaggttgcggataacgctgccgccaagcctctcatcactaccctactccctaagatgattgcacgcatcaacgactggtttgaggaagtgaaagctaagcgcggcaagcgcccgacagccttccagttcctgcaagaaatcaagccggaagccgtagcgtacatcaccattaagaccactctggcttgcctaaccagtgcggaccgtacaaccgttcaggctgtagcaagcgcaatcggtcgggccattgaggacgaggctcgcttcggtcgtatccgtgaccttgaagctaagcacttcaaagaaaactatgaggaacaactcaacaagcgcgtagggcacgtctacaagaaagcatttatgcaagttgtcgaggctgacatgctctctaagggtctactcggtggcgaggcgtggtcttcgtggcataaggaagactctattcatgtaggagtacgctgcatcgagatgctcattgagtcaaccggaatggttagcttacaccgccaaaatgctggcgtagtaggtcaagactctgagactatcgaactcgcacctgaatacgctgaggctatcgcaacccgtgcaggtgcgctggctggcatctctccgatgttccaaccttgcgtagttcctcctaagccgtggactggcattactggtggtggctattgggctaacggtcgtcgtcctctggcgctggtgcgtactcacagtaagaaaggtctgatgcgctacgaagacgtttacatgcctgaggtgtacaaagcgattaacattgcgcaaaacaccgcctggtcgatcaacaagtgggtcctggcggtcgccaacgtaatcaccaagtggaagcattgtccggtccgggacatccctgcgattgagcgtgaagaactcccgatgaaaccggaagacatcgacatgaatcctgaggctctcaccgcgtggaaacgtgctaaagctgctgtgtaccgcagagacaaggctcgcaagtctcgccgtatcttgcttgagttcatgcttgagcaagccaataagtttgctaaccataaggccatctggttcccttacaacatggactggcgcggtcgtgtttacgctgtgtcaatgttcaacccgcaaggtaacgatatgaccaaaggactgcttacgctggcgaaaggtaaaccaatcggtaaggaaggttactactggctgaaaatccacggtgcaaactgtgcgggtgtcgataaggttccgttccctgagcgcatcaagttcattgaggaaaaccacgagaacatcatggcttgcgctaagtctccactggagaacacttggtgggctgagcaagatagtccgttctgcttccttgcgttctgctttgagtacgctggggtacagcaccacggcctgagctataactgctcccttccgctggcgtttgacgggtcttgctctggcatccagcacttctccgcgatgctccgagatgaggtaggtggtcgcgcggttaacttgcttcctagtgaaaccgttcaggacatctacgggattgttgctaagaaagtcaacgagattctacaagcagacgcaatcaatgggaccgataacgaagtagttaccgtgaccgatgagaacactggtgaaatctctgagaaagtcaagctgggcactaaggcactggctggtcaatggctggcttacggtgttactcgcagtgtgactaagcgttcagtcatgacgctggcttacgggtccaaagagttcggcttccgtcaacaagtgctgcgccacactattcagtgggctattgattccggcaagggtctgatgttcactcagccgaatcaggctgctggatacatggctaagctgatttgggaatctgtgagcgtgacggtggtagctgcggttgaagcaatgaactggcttaagtctgctgctaagctgctggctgctgaggtcaaagataagaagactggagagattcttcgcaagcgttgcgctgtgcattgggtaactcctgatggtttccctgtgtggcaggaatacaagaagcctattcagacgcgcttgaacctgatgttcctcggtcagttccgcttacagcctaccattaacaccaacaaagatagcgagattgatgcacacaaacaggagtctggtatcgctcctaactttgtacacagccaagacggtagccaccttcgtaagactgtagtgtgggcacacgagaagtacaagatcgaatcttttgcactgattcacgactccttcggtaccattccggctgacgctgcgaacctgttcaaagcagtgcgcgaaactatggttgacacatatgagtcttgtgatgtactggctgatttctacgaccagttcgctgaccagttgcacgagtctcaattggacaaaatgccagcacttccggctaaaggtaacttgaacctccgtgacatcttagagtcggacttcgcgttcgcg

SEQ ID NO: 158 - protein, 890 aa, synthetic construct
  REGION 1..890: note = Variant of RNA polymerase
MHHHHHHMNTINIAKNDFSDIELAAIPFNTLADHYGERLAREQLALEHESYEMGEAGFRKMFERQLKAGEVADNAAAKPLITTLLPKMIARINDWFEEVKAKRGKRPTAFQFLQEIKPEAVAYITIKTTLACLTSADRTTVQAVASAIGRAIEDEARFGRIRDLEAKHFKENYEEQLNKRVGHVYKKAFMQVVEADMLSKGLLGGEAWSSWHKEDSIHVGVRCIEMLIESTGMVSLHRQNAGVVGQDSETIELAPEYAEAIATRAGALAGISPMFQPCVVPPKPWTGITGGGYWANGRRPLALVRTHSKKGLMRYEDVYMPEVYKAINIAQNTAWSINKWVLAVANVITKWKHCPVRDIPAIEREELPMKPEDIDMNPEALTAWKRAKAAVYRRDKARKSRRILLEFMLEQANKFANHKAIWFPYNMDWRGRVYAVSMFNPQGNDMTKGLLTLAKGKPIGKEGYYWLKIHGANCAGVDKVPFPERIKFIEENHENIMACAKSPLENTWWAEQDSPFCFLAFCFEYAGVQHHGLSYNCSLPLAFDGSCSGIQHFSAMLRDEVGGRAVNLLPSETVQDIYGIVAKKVNEILQADAINGTDNEVVTVTDENTGEISEKVKLGTKALAGQWLAYGVTRSVTKRSVMTLAYGSKEFGFRQQVLRHTIQWAIDSGKGLMFTQPNQAAGYMAKLIWESVSVTVVAAVEAMNWLKSAAKLLAAEVKDKKTGEILRKRCAVHWVTPDGFPVWQEYKKPIQTRLNLMFLGQFRLQPTINTNKDSEIDAHKQESGIAPNFVHSQDGSHLRKTVVWAHEKYKIESFALIHDSFGTIPADAANLFKAVRETMVDTYESCDVLADFYDQFADQLHESQLDKMPALPAKGNLNLRDILESDFAFA

SEQ ID NO: 159 - DNA, 2670 bp, synthetic construct
  misc_feature 1..2670: note = Variant of RNA polymerase
  source 1..2670: mol_type = other DNA
atgcaccatcaccatcaccatatgaacacgattaacatcgctaagaacgacttctctgacatcgaactggctgctatcccgttcaacactctggctgaccattacggtgagcgtttagctcgcgaacagttggcccttgagcatgagtcttacgagatgggtgaagcacgtttccgcaagatgtttgagcgtcaacttaaagctggtgaggttgcggataacgctgccgccaagcctctcatcactaccctactccctaagatgattgcacgcatcaacgactggtttgaggaagtgaaagctaagcgcggcaagcgcccgacagccttccagttcctgcaagaaatcaagccggaagccgtagcgtacatcaccattaagaccactctggcttgcctaaccagtgcggaccgtacaaccgttcaggctgtagcaagcgcaatcggtcgggccattgaggacgaggctcgcttcggtcgtatccgtgaccttgaagctaagcacttccaaaaaaactatgaggaacaactcaacaagcgcgtagggcacgtctacaagaaagcatttatgcaagttgtcgaggctgacatgctctctaagggtctactcggtggcgaggcgtggtcttcgtggcataaggaagactctattcatgtaggagtacgctgcatcgagatgctcattgagtcaaccggaatggttagcttacaccgccaaaatgctggcgtagtaggtcaagactctgagactatcgaactcgcacctgaatacgctgaggctatcgcaacccgtgcaggtgcgctggctggcatctctccgatgttccaaccttgcgtagttcctcctaagccgtggactggcattactggtggtggctattgggctaacggtcgtcgtcctctggcgctggtgcgtactcacagtaagaaaggtctgatgcgctacgaagacgtttacatgcctgaggtgtacaaagcgattaacattgcgcaaaacaccgcctggtcgatcaacaagtgggtcctggcggtcgccaacgtaatcaccaagtggaagcattgtccggtccgggacatccctgcgattgagcgtgaagaactcccgatgaaaccggaagacatcgacatgaatcctgaggctctcaccgcgtggaaacgtgctaaagctgctgtgtaccgcagagacaaggctcgcaagtctcgccgtatcttgcttgagttcatgcttgagcaagccaataagtttgctaaccataaggccatctggttcccttacaacatggactggcgcggtcgtgtttacgctgtgtcaatgttcaacccgcaaggtaacgatatgaccaaaggactgcttacgctggcgaaaggtaaaccaatcggtaaggaaggttactactggctgaaaatccacggtgcaaactgtgcgggtgtcgataaggttccgttccctgagcgcatcaagttcattgaggaaaaccacgagaacatcatggcttgcgctaagtctccactggagaacacttggtgggctgagcaagatagtccgttctgcttccttgcgttctgctttgagtacgctggggtacagcaccacggcctgagctataactgctcccttccgctggcgtttgacgggtcttgctctggcatccagcacttctccgcgatgctccgagatgaggtaggtggtcgcgcggttaacttgcttcctagtgaaaccgttcaggacatctacgggattgttgctaagaaagtcaacgagattctacaagcagacgcaatcaatgggaccgataacgaagtagttaccgtgaccgatgagaacactggtgaaatctctgagaaagtcaagctgggcactaaggcactggctggtcaatggctggcttacggtgttactcgcagtgtgactaagcgttcagtcatgacgctggcttacgggtccaaagagttcggcttccgtcaacaagtgctgcgccacactattcagtgggctattgattccggcaagggtctgatgttcactcagccgaatcaggctgctggatacatggctaagctgatttgggaatctgtgagcgtgacggtggtagctgcggttgaagcaatgaactggcttaagtctgctgctaagctgctggctgctgaggtcaaagataagaagactggagagattcttcgcaagcgttgcgctgtgcattgggtaactcctgatggtttccctgtgtggcaggaatacaagaagcctattcagacgcgcttgaacctgatgttcctcggtcagttccgcttacagcctaccattaacaccaacaaagatagcgagattgatgcacacaaacaggagtctggtatcgctcctaactttgtacacagccaagacggtagccaccttcgtaagactgtagtgtgggcacacgagaagtacaagatcgaatcttttgcactgattcacgactccttcggtaccattccggctgacgctgcgaacctgttcaaagcagtgcgcgaaactatggttgacacatatgagtcttgtgatgtactggctgatttctacgaccagttcgctgaccagttgcacgagtctcaattggacaaaatgccagcacttccggctaaaggtaacttgaacctccgtgacatcttagagtcggacttcgcgttcgcg

SEQ ID NO: 160 - protein, 890 aa, synthetic construct
  REGION 1..890: note = Variant of RNA polymerase
MHHHHHHMNTINIAKNDFSDIELAAIPFNTLADHYGERLAREQLALEHESYEMGEARFRKMFERQLKAGEVADNAAAKPLITTLLPKMIARINDWFEEVKAKRGKRPTAFQFLQEIKPEAVAYITIKTTLACLTSADRTTVQAVASAIGRAIEDEARFGRIRDLEAKHFQKNYEEQLNKRVGHVYKKAFMQVVEADMLSKGLLGGEAWSSWHKEDSIHVGVRCIEMLIESTGMVSLHRQNAGVVGQDSETIELAPEYAEAIATRAGALAGISPMFQPCVVPPKPWTGITGGGYWANGRRPLALVRTHSKKGLMRYEDVYMPEVYKAINIAQNTAWSINKWVLAVANVITKWKHCPVRDIPAIEREELPMKPEDIDMNPEALTAWKRAKAAVYRRDKARKSRRILLEFMLEQANKFANHKAIWFPYNMDWRGRVYAVSMFNPQGNDMTKGLLTLAKGKPIGKEGYYWLKIHGANCAGVDKVPFPERIKFIEENHENIMACAKSPLENTWWAEQDSPFCFLAFCFEYAGVQHHGLSYNCSLPLAFDGSCSGIQHFSAMLRDEVGGRAVNLLPSETVQDIYGIVAKKVNEILQADAINGTDNEVVTVTDENTGEISEKVKLGTKALAGQWLAYGVTRSVTKRSVMTLAYGSKEFGFRQQVLRHTIQWAIDSGKGLMFTQPNQAAGYMAKLIWESVSVTVVAAVEAMNWLKSAAKLLAAEVKDKKTGEILRKRCAVHWVTPDGFPVWQEYKKPIQTRLNLMFLGQFRLQPTINTNKDSEIDAHKQESGIAPNFVHSQDGSHLRKTVVWAHEKYKIESFALIHDSFGTIPADAANLFKAVRETMVDTYESCDVLADFYDQFADQLHESQLDKMPALPAKGNLNLRDILESDFAFA

SEQ ID NO: 161 - DNA, 2670 bp, synthetic construct
  misc_feature 1..2670: note = Variant of RNA polymerase
  source 1..2670: mol_type = other DNA
atgcaccatcaccatcaccatatgaacacgattaacatcgctaagaacgacttctctgacatcgaactggctgctatcccgttcaacactctggctgaccattacggtgagcgtttagctcgcgaacagttggcccttgagcatgagtcttacgagatgggtgaagcaggtttccgcaagatgtttgagcgtcaacttaaagctggtgaggttgcggataacgctgccgccaagcctctcatcactaccctactccctaagatgattgcacgcatcaacgactggtttgaggaagtgaaagctaagcgcggcaagcgcccgacagccttccagttcctgcaagaaatcaagccggaagccgtagcgtacatcaccattaagaccactctggcttgcctaaccagtgcggaccgtacaaccgttcaggctgtagcaagcgcaatcggtcgggccattgaggacgaggctcgcttcggtcgtatccgtgaccttgaagctaagcacttcaaagaaaaagttgaggaacaactcaacaagcgcgtagggcacgtctacaagaaagcatttatgcaagttgtcgaggctgacatgctctctaagggtctactcggtggcgaggcgtggtcttcgtggcataaggaagactctattcatgtaggagtacgctgcatcgagatgctcattgagtcaaccggaatggttagcttacaccgccaaaatgctggcgtagtaggtcaagactctgagactatcgaactcgcacctgaatacgctgaggctatcgcaacccgtgcaggtgcgctggctggcatctctccgatgttccaaccttgcgtagttcctcctaagccgtggactggcattactggtggtggctattgggctaacggtcgtcgtcctctggcgctggtgcgtactcacagtaagaaaggtctgatgcgctacgaagacgtttacatgcctgaggtgtacaaagcgattaacattgcgcaaaacaccgcctggaagatcaacaagaaagtcctggcggtcgccaacgtaatcaccaagtggaagcattgtccggtccgggacatccctgcgattgagcgtgaagaactcccgatgaaaccggaagacatcgacatgaatcctgaggctctcaccgcgtggaaacgtgctaaagctgctgtgtaccgcagagacaaggctcgcaagtctcgccgtatcttgcttgagttcatgcttgagcaagccaataagtttgctaaccataaggccatctggttcccttacaacatggactggcgcggtcgtgtttacgctgtgtcaatgttcaacccgcaaggtaacgatatgaccaaaggactgcttacgctggcgaaaggtaaaccaatcggtaaggaaggttactactggctgaaaatccacggtgcaaactgtgcgggtgtcgataaggttccgttccctgagcgcatcaagttcattgaggaaaaccacgagaacatcatggcttgcgctaagtctccactggagaacacttggtgggctgagcaagatagtccgttctgcttccttgcgttctgctttgagtacgctggggtacagcaccacggcctgagctataactgctcccttccgctggcgtttgacgggtcttgctctggcatccagcacttctccgcgatgctccgagatgaggtaggtggtcgcgcggttaacttgcttcctagtgaaaccgttcaggacatctacgggattgttgctaagaaagtcaacgagattctacaagcagacgcaatcaatgggaccgataacgaagtagttaccgtgaccgatgagaacactggtgaaatctctgagaaagtcaagctgggcactaaggcactggctggtcaatggctggcttacggtgttactcgcagtgtgactaagcgttcagtcatgacgctggcttacgggtccaaagagttcggcttccgtcaacaagtgctgcgcgacactattcagtgggctattgattccggcaagggtctgatgttcactcagccgaatcaggctgctggatacatggctaagctgatttgggaatctgtgagcgtgacggtggtagctgcggttgaagcaatgaactggcttaagtctgctgctaagctgctggctgctgaggtcaaagataagaagactggagagattcttcgcaagcgttgcgctgtgcattgggtaactcctgatggtttccctgtgtggcaggaatacaagaagcctattcagacgcgcttgaacctgatgttcctcggtcagttccgcttacagcctaccattaacaccaacaaagatagcgagattgatgcacacaaacaggagtctggtatcgctcctaactttgtacacagccaagacggtagccaccttcgtaagactgtagtgtgggcacacgagaagtacggtatcgaatcttttgcactgattcacgactccttcggtaccattccggctgacgctgcgaacctgttcaaagcagtgcgcgaaactatggttgacacatatgagtcttgtgatgtactggctgatttctacgaccagttcgctgaccagttgcacgagtctcaattggacaaaatgccagcacttccggctaaaggtaacttgaacctccgtgacatcttagagtcggacttcgcgttcgcg

SEQ ID NO: 162 - protein, 890 aa, synthetic construct
  REGION 1..890: note = Variant of RNA polymerase
MHHHHHHMNTINIAKNDFSDIELAAIPFNTLADHYGERLAREQLALEHESYEMGEAGFRKMFERQLKAGEVADNAAAKPLITTLLPKMIARINDWFEEVKAKRGKRPTAFQFLQEIKPEAVAYITIKTTLACLTSADRTTVQAVASAIGRAIEDEARFGRIRDLEAKHFKEKVEEQLNKRVGHVYKKAFMQVVEADMLSKGLLGGEAWSSWHKEDSIHVGVRCIEMLIESTGMVSLHRQNAGVVGQDSETIELAPEYAEAIATRAGALAGISPMFQPCVVPPKPWTGITGGGYWANGRRPLALVRTHSKKGLMRYEDVYMPEVYKAINIAQNTAWKINKKVLAVANVITKWKHCPVRDIPAIEREELPMKPEDIDMNPEALTAWKRAKAAVYRRDKARKSRRILLEFMLEQANKFANHKAIWFPYNMDWRGRVYAVSMFNPQGNDMTKGLLTLAKGKPIGKEGYYWLKIHGANCAGVDKVPFPERIKFIEENHENIMACAKSPLENTWWAEQDSPFCFLAFCFEYAGVQHHGLSYNCSLPLAFDGSCSGIQHFSAMLRDEVGGRAVNLLPSETVQDIYGIVAKKVNEILQADAINGTDNEVVTVTDENTGEISEKVKLGTKALAGQWLAYGVTRSVTKRSVMTLAYGSKEFGFRQQVLRDTIQWAIDSGKGLMFTQPNQAAGYMAKLIWESVSVTVVAAVEAMNWLKSAAKLLAAEVKDKKTGEILRKRCAVHWVTPDGFPVWQEYKKPIQTRLNLMFLGQFRLQPTINTNKDSEIDAHKQESGIAPNFVHSQDGSHLRKTVVWAHEKYGIESFALIHDSFGTIPADAANLFKAVRETMVDTYESCDVLADFYDQFADQLHESQLDKMPALPAKGNLNLRDILESDFAFA

SEQ ID NO: 163 - DNA, 2670 bp, synthetic construct
  misc_feature 1..2670: note = Variant of RNA polymerase
  source 1..2670: mol_type = other DNA
atgcaccatcaccatcaccatatgaacacgattaacatcgctaagaacgacttctctgacatcgaactggctgctatcccgttcaacactctggctgaccattacggtgagcgtttagctcgcgaacagttggcccttgagcatgagtcttacgagatgggtgaagcacgtttccgcaagatgtttgagcgtcaacttaaagctggtgaggttgcggataacgctgccgccaagcctctcatcactaccctactccctaagatgattgcacgcatcaacgactggtttgaggaagtgaaagctaagcgcggcaagcgcccgacagccttccagttcctgcaagaaatcaagccggaagccgtagcgtacatcaccattaagaccactctggcttgcctaaccagtgcggaccgtacaaccgttcaggctgtagcaagcgcaatcggtcgggccattgaggacgaggctcgcttcggtcgtatccgtgaccttgaagctaagcacttcaagaaaaactatgaggaacaactcaacaagcgcgtagggcacgtctacaagaaagcatttatgcaagttgtcgaggctgacatgctctctaagggtctactcggtggcgaggcgtggtcttcgtggcataaggaagactctattcatgtaggagtacgctgcatcgagatgctcattgagtcaaccggaatggttagcttacaccgccaaaatgctggcgtagtaggtcaagactctgagactatcgaactcgcacctgaatacgctgaggctatcgcaacccgtgcaggtgcgctggctggcatctctccgatgttccaaccttgcgtagttcctcctaagccgtggactggcattactggtggtggctattgggctaacggtcgtcgtcctctggcgctggtgcgtactcacagtaagaaaggtctgatgcgctacgaagacgtttacatgcctgaggtgtacaaagcgattaacattgcgcaaaacaccgcctggtcgatcaacaagtgggtcctggcggtcgccaacgtaatcaccaagtggaagcattgtccggtccgggacatccctgcgattgagcgtgaagaactcccgatgaaaccggaagacatcgacatgaatcctgaggctctcaccgcgtggaaacgtgctaaagctgctgtgtaccgcagagacaaggctcgcaagtctcgccgtatcttgcttgagttcatgcttgagcaagccaataagtttgctaaccataaggccatctggttcccttacaacatggactggcgcggtcgtgtttacgctgtgtcaatgttcaacccgcaaggtaacgatatgaccaaaggactgcttacgctggcgaaaggtaaaccaatcggtaaggaaggttactactggctgaaaatccacggtgcaaactgtgcgggtgtcgataaggttccgttccctgagcgcatcaagttcattgaggaaaaccacgagaacatcatggcttgcgctaagtctccactggagaacacttggtgggctgagcaagatagtccgttctgcttccttgcgttctgctttgagtacgctggggtacagcaccacggcctgagctataactgctcccttccgctggcgtttgacgggtcttgctctggcatccagcacttctccgcgatgctccgagatgaggtaggtggtcgcgcggttaacttgcttcctagtgaaaccgttcaggacatctacgggattgttgctaagaaagtcaacgagattctacaagcagacgcaatcaatgggaccgataacgaagtagttaccgtgaccgatgagaacactggtgaaatctctgagaaagtcaagctgggcactaaggcactggctggtcaatggctggcttacggtgttactcgcagtgtgactaagcgttcagtcatgacgctggcttacgggtccaaagagttcggcttccgtcaacaagtgctggaggacactattcagtgggctattgattccggcaagggtctgatgttcactcagccgaatcaggctgctggatacatggctaagctgatttgggaatctgtgagcgtgacggtggtagctgcggttgaagcaatgaactggcttaagtctgctgctaagctgctggctgctgaggtcaaagataagaagactggagagattcttcgcaagcgttgcgctgtgcattgggtaactcctgatggtttccctgtgtggcaggaatacaagaagcctattcagacgcgcttgaacctgatgttcctcggtcagttccgcttacagcctaccattaacaccaacaaagatagcgagattgatgcacacaaacaggagtctggtatcgctcctaactttgtacacagccaagacggtagccaccttcgtaagactgtagtgtgggcacacgagaagtacggtatcgaatcttttgcactgattcacgactccttcggtaccattccggctgacgctgcgaacctgttcaaagcagtgcgcgaaactatggttgacacatatgagtcttgtgatgtactggctgatttctacgaccagttcgctgaccagttgcacgagtctcaattggacaaaatgccagcacttccggctaaaggtaacttgaacctccgtgacatcttagagtcggacttcgcgttcgcg

SEQ ID NO: 164 - protein, 890 aa, synthetic construct
  REGION 1..890: note = Variant of RNA polymerase
MHHHHHHMNTINIAKNDFSDIELAAIPFNTLADHYGERLAREQLALEHESYEMGEARFRKMFERQLKAGEVADNAAAKPLITTLLPKMIARINDWFEEVKAKRGKRPTAFQFLQEIKPEAVAYITIKTTLACLTSADRTTVQAVASAIGRAIEDEARFGRIRDLEAKHFKKNYEEQLNKRVGHVYKKAFMQVVEADMLSKGLLGGEAWSSWHKEDSIHVGVRCIEMLIESTGMVSLHRQNAGVVGQDSETIELAPEYAEAIATRAGALAGISPMFQPCVVPPKPWTGITGGGYWANGRRPLALVRTHSKKGLMRYEDVYMPEVYKAINIAQNTAWSINKWVLAVANVITKWKHCPVRDIPAIEREELPMKPEDIDMNPEALTAWKRAKAAVYRRDKARKSRRILLEFMLEQANKFANHKAIWFPYNMDWRGRVYAVSMFNPQGNDMTKGLLTLAKGKPIGKEGYYWLKIHGANCAGVDKVPFPERIKFIEENHENIMACAKSPLENTWWAEQDSPFCFLAFCFEYAGVQHHGLSYNCSLPLAFDGSCSGIQHFSAMLRDEVGGRAVNLLPSETVQDIYGIVAKKVNEILQADAINGTDNEVVTVTDENTGEISEKVKLGTKALAGQWLAYGVTRSVTKRSVMTLAYGSKEFGFRQQVLEDTIQWAIDSGKGLMFTQPNQAAGYMAKLIWESVSVTVVAAVEAMNWLKSAAKLLAAEVKDKKTGEILRKRCAVHWVTPDGFPVWQEYKKPIQTRLNLMFLGQFRLQPTINTNKDSEIDAHKQESGIAPNFVHSQDGSHLRKTVVWAHEKYGIESFALIHDSFGTIPADAANLFKAVRETMVDTYESCDVLADFYDQFADQLHESQLDKMPALPAKGNLNLRDILESDFAFA

SEQ ID NO: 165 - DNA, 2670 bp, synthetic construct
  misc_feature 1..2670: note = Variant of RNA polymerase
  source 1..2670: mol_type = other DNA
atgcaccatcaccatcaccatatgaacacgattaacatcgctaagaacgacttctctgacatcgaactggctgctatcccgttcaacactctggctgaccattacggtgagcgtttagctcgcgaacagttggcccttgagcatgagtcttacgagatgggtgaagcacgtttccgcaagatgtttgagcgtcaacttaaagctggtgaggttgcggataacgctgccgccaagcctctcatcactaccctactccctaagatgattgcacgcatcaacgactggtttgaggaagtgaaagctaagcgcggcaagcgcccgacagccttccagttcctgcaagaaatcaagccggaagccgtagcgtacatcaccattaagaccactctggcttgcctaaccagtgcggaccgtacaaccgttcaggctgtagcaagcgcaatcggtcgggccattgaggacgaggctcgcttcggtcgtatccgtgaccttgaagctaagcacttcaaagaagaatatgaggaacaactcaacaagcgcgtagggcacgtctacaagaaagcatttatgcaagttgtcgaggctgacatgctctctaagggtctactcggtggcgaggcgtggtcttcgtggcataaggaagactctattcatgtaggagtacgctgcatcgagatgctcattgagtcaaccggaatggttagcttacaccgccaaaatgctggcgtagtaggtcaagactctgagactatcgaactcgcacctgaatacgctgaggctatcgcaacccgtgcaggtgcgctggctggcatctctccgatgttccaaccttgcgtagttcctcctaagccgtggactggcattactggtggtggctattgggctaacggtcgtcgtcctctggcgctggtgcgtactcacagtaagaaaggtctgatgcgctacgaagacgtttacatgcctgaggtgtacaaagcgattaacattgcgcaaaacaccgcctggtcgatcaacaagtgggtcctggcggtcgccaacgtaatcaccaagtggaagcattgtccggtccgggacatccctgcgattgagcgtgaagaactcccgatgaaaccggaagacatcgacatgaatcctgaggctctcaccgcgtggaaacgtgctaaagctgctgtgtaccgcagagacaaggctcgcaagtctcgccgtatcttgcttgagttcatgcttgagcaagccaataagtttgctaaccataaggccatctggttcccttacaacatggactggcgcggtcgtgtttacgctgtgtcaatgttcaacccgcaaggtaacgatatgaccaaaggactgcttacgctggcgaaaggtaaaccaatcggtaaggaaggttactactggctgaaaatccacggtgcaaactgtgcgggtgtcgataaggttccgttccctgagcgcatcaagttcattgaggaaaaccacgagaacatcatggcttgcgctaagtctccactggagaacacttggtgggctgagcaagatagtccgttctgcttccttgcgttctgctttgagtacgctggggtacagcaccacggcctgagctataactgctcccttccgctggcgtttgacgggtcttgctctggcatccagcacttctccgcgatgctccgagatgaggtaggtggtcgcgcggttaacttgcttcctagtgaaaccgttcaggacatctacgggattgttgctaagaaagtcaacgagattctacaagcagacgcaatcaatgggaccgataacgaagtagttaccgtgaccgatgagaacactggtgaaatctctgagaaagtcaagctgggcactaaggcactggctggtcaatggctggcttacggtgttactcgcagtgtgactaagcgttcagtcatgacgctggcttacgggtccaaagagttcggcttccgtcaacaagtgctgcgccacactattcagtgggctattgattccggcaagggtctgatgttcactcagccgaatcaggctgctggatacatggctaagctgatttgggaatctgtgagcgtgacggtggtagctgcggttgaagcaatgaactggcttaagtctgctgctaagctgctggctgctgaggtcaaagataagaagactggagagattcttcgcaagcgttgcgctgtgcattgggtaactcctgatggtttccctgtgtggcaggaatacaagaagcctattcagacgcgcttgaacctgatgttcctcggtcagttccgcttacagcctaccattaacaccaacaaagatagcgagattgatgcacacaaacaggagtctggtatcgctcctaactttgtacacagccaagacggtagccaccttcgtaagactgtagtgtgggcacacgagaagtacggtatcgaatcttttgcactgattcacgactccttcggtaccattccggctgacgctgcgaacctgttcaaagcagtgcgcgaaactatggttgacacatatgagtcttgtgatgtactggctgatttctacgaccagttcgctgaccagttgcacgagtctcaattggacaaaatgccagcacttccggctaaaggtaacttgaacctccgtgacatcttagagtcggacttcgcgttcgcg

SEQ ID NO: 166 - protein, 890 aa, synthetic construct
  REGION 1..890: note = Variant of RNA polymerase
MHHHHHHMNTINIAKNDFSDIELAAIPFNTLADHYGERLAREQLALEHESYEMGEARFRKMFERQLKAGEVADNAAAKPLITTLLPKMIARINDWFEEVKAKRGKRPTAFQFLQEIKPEAVAYITIKTTLACLTSADRTTVQAVASAIGRAIEDEARFGRIRDLEAKHFKEEYEEQLNKRVGHVYKKAFMQVVEADMLSKGLLGGEAWSSWHKEDSIHVGVRCIEMLIESTGMVSLHRQNAGVVGQDSETIELAPEYAEAIATRAGALAGISPMFQPCVVPPKPWTGITGGGYWANGRRPLALVRTHSKKGLMRYEDVYMPEVYKAINIAQNTAWSINKWVLAVANVITKWKHCPVRDIPAIEREELPMKPEDIDMNPEALTAWKRAKAAVYRRDKARKSRRILLEFMLEQANKFANHKAIWFPYNMDWRGRVYAVSMFNPQGNDMTKGLLTLAKGKPIGKEGYYWLKIHGANCAGVDKVPFPERIKFIEENHENIMACAKSPLENTWWAEQDSPFCFLAFCFEYAGVQHHGLSYNCSLPLAFDGSCSGIQHFSAMLRDEVGGRAVNLLPSETVQDIYGIVAKKVNEILQADAINGTDNEVVTVTDENTGEISEKVKLGTKALAGQWLAYGVTRSVTKRSVMTLAYGSKEFGFRQQVLRHTIQWAIDSGKGLMFTQPNQAAGYMAKLIWESVSVTVVAAVEAMNWLKSAAKLLAAEVKDKKTGEILRKRCAVHWVTPDGFPVWQEYKKPIQTRLNLMFLGQFRLQPTINTNKDSEIDAHKQESGIAPNFVHSQDGSHLRKTVVWAHEKYGIESFALIHDSFGTIPADAANLFKAVRETMVDTYESCDVLADFYDQFADQLHESQLDKMPALPAKGNLNLRDILESDFAFA

SEQ ID NO: 167 - DNA, 2670 bp, synthetic construct
  misc_feature 1..2670: note = Variant of RNA polymerase
  source 1..2670: mol_type = other DNA
atgcaccatcaccatcaccatatgaacacgattaacatcgctaagaacgacttctctgacatcgaactggctgctatcccgttcaacactctggctgaccattacggtgagcgtttagctcgcgaacagttggcccttgagcatgagtcttacgagatgggtgaagcaggtttccgcaagatgtttgagcgtcaacttaaagctggtgaggttgcggataacgctgccgccaagcctctcatcactaccctactccctaagatgattgcacgcatcaacgactggtttgaggaagtgaaagctaagcgcggcaagcgcccgacagccttccagttcctgcaagaaatcaagccggaagccgtagcgtacatcaccattaagaccactctggcttgcctaaccagtgcggaccgtacaaccgttcaggctgtagcaagcgcaatcggtcgggccattgaggacgaggctcgcttcggtcgtatccgtgaccttgaagctaagcacttccaagaaaactatgaggaacaactcaacaagcgcgtagggcacgtctacaagaaagcatttatgcaagttgtcgaggctgacatgctctctaagggtctactcggtggcgaggcgtggtcttcgtggcataaggaagactctattcatgtaggagtacgctgcatcgagatgctcattgagtcaaccggaatggttagcttacaccgccaaaatgctggcgtagtaggtcaagactctgagactatcgaactcgcacctgaatacgctgaggctatcgcaacccgtgcaggtgcgctggctggcatctctccgatgttccaaccttgcgtagttcctcctaagccgtggactggcattactggtggtggctattgggctaacggtcgtcgtcctctggcgctggtgcgtactcacagtaagaaaggtctgatgcgctacgaagacgtttacatgcctgaggtgtacaaagcgattaacattgcgcaaaacaccgcctggtcgatcaacaagtgggtcctggcggtcgccaacgtaatcaccaagtggaagcattgtccggtccgggacatccctgcgattgagcgtgaagaactcccgatgaaaccggaagacatcgacatgaatcctgaggctctcaccgcgtggaaacgtgctaaagctgctgtgtaccgcagagacaaggctcgcaagtctcgccgtatcttgcttgagttcatgcttgagcaagccaataagtttgctaaccataaggccatctggttcccttacaacatggactggcgcggtcgtgtttacgctgtgtcaatgttcaacccgcaaggtaacgatatgaccaaaggactgcttacgctggcgaaaggtaaaccaatcggtaaggaaggttactactggctgaaaatccacggtgcaaactgtgcgggtgtcgataaggttccgttccctgagcgcatcaagttcattgaggaaaaccacgagaacatcatggcttgcgctaagtctccactggagaacacttggtgggctgagcaagatagtccgttctgcttccttgcgttctgctttgagtacgctggggtacagcaccacggcctgagctataactgctcccttccgctggcgtttgacgggtcttgctctggcatccagcacttctccgcgatgctccgagatgaggtaggtggtcgcgcggttaacttgcttcctagtgaaaccgttcaggacatctacgggattgttgctaagaaagtcaacgagattctacaagcagacgcaatcaatgggaccgataacgaagtagttaccgtgaccgatgagaacactggtgaaatctctgagaaagtcaagctgggcactaaggcactggctggtcaatggctggcttacggtgttactcgcagtgtgactaagcgttcagtcatgacgctggcttacgggtccaaagagttcggcttccgtcaacaagtgctgcgccacactattcagtgggctattgattccggcaagggtctgatgttcactcagccgaatcaggctgctggatacatggctaagctgatttgggaatctgtgagcgtgacggtggtagctgcggttgaagcaatgaactggcttaagtctgctgctaagctgctggctgctgaggtcaaagataagaagactggagagattcttcgcaagcgttgcgctgtgcattgggtaactcctgatggtttccctgtgtggcaggaatacaagaagcctattcagacgcgcttgaacctgatgttcctcggtcagttccgcttacagcctaccattaacaccaacaaagatagcgagattgatgcacacaaacaggagtctggtatcgctcctaactttgtacacagccaagacggtagccaccttcgtaagactgtagtgtgggcacacgagaagtacaagatcgaatcttttgcactgattcacgactccttcggtaccattccggctgacgctgcgaacctgttcaaagcagtgcgcgaaactatggttgacacatatgagtcttgtgatgtactggctgatttctacgaccagttcgctgaccagttgcacgagtctcaattggacaaaatgccagcacttccggctaaaggtaacttgaacctccgtgacatcttagagtcggacttcgcgttcgcg

SEQ ID NO: 168 - protein, 890 aa, synthetic construct
  REGION 1..890: note = Variant of RNA polymerase
MHHHHHHMNTINIAKNDFSDIELAAIPFNTLADHYGERLAREQLALEHESYEMGEAGFRKMFERQLKAGEVADNAAAKPLITTLLPKMIARINDWFEEVKAKRGKRPTAFQFLQEIKPEAVAYITIKTTLACLTSADRTTVQAVASAIGRAIEDEARFGRIRDLEAKHFQENYEEQLNKRVGHVYKKAFMQVVEADMLSKGLLGGEAWSSWHKEDSIHVGVRCIEMLIESTGMVSLHRQNAGVVGQDSETIELAPEYAEAIATRAGALAGISPMFQPCVVPPKPWTGITGGGYWANGRRPLALVRTHSKKGLMRYEDVYMPEVYKAINIAQNTAWSINKWVLAVANVITKWKHCPVRDIPAIEREELPMKPEDIDMNPEALTAWKRAKAAVYRRDKARKSRRILLEFMLEQANKFANHKAIWFPYNMDWRGRVYAVSMFNPQGNDMTKGLLTLAKGKPIGKEGYYWLKIHGANCAGVDKVPFPERIKFIEENHENIMACAKSPLENTWWAEQDSPFCFLAFCFEYAGVQHHGLSYNCSLPLAFDGSCSGIQHFSAMLRDEVGGRAVNLLPSETVQDIYGIVAKKVNEILQADAINGTDNEVVTVTDENTGEISEKVKLGTKALAGQWLAYGVTRSVTKRSVMTLAYGSKEFGFRQQVLRHTIQWAIDSGKGLMFTQPNQAAGYMAKLIWESVSVTVVAAVEAMNWLKSAAKLLAAEVKDKKTGEILRKRCAVHWVTPDGFPVWQEYKKPIQTRLNLMFLGQFRLQPTINTNKDSEIDAHKQESGIAPNFVHSQDGSHLRKTVVWAHEKYKIESFALIHDSFGTIPADAANLFKAVRETMVDTYESCDVLADFYDQFADQLHESQLDKMPALPAKGNLNLRDILESDFAFA

SEQ ID NO: 169 - DNA, 2670 bp, synthetic construct
  misc_feature 1..2670: note = Variant of RNA polymerase
  source 1..2670: mol_type = other DNA
atgcaccatcaccatcaccatatgaacacgattaacatcgctaagaacgacttctctgacatcgaactggctgctatcccgttcaacactctggctgaccattacggtgagcgtttagctcgcgaacagttggcccttgagcatgagtcttacgagatgggtgaagcaggtttccgcaagatgtttgagcgtcaacttaaagctggtgaggttgcggataacgctgccgccaagcctctcatcactaccctactccctaagatgattgcacgcatcaacgactggtttgaggaagtgaaagctaagcgcggcaagcgcccgacagccttccagttcctgcaagaaatcaagccggaagccgtagcgtacatcaccattaagaccactctggcttgcctaaccagtgcggaccgtacaaccgttcaggctgtagcaagcgcaatcggtcgggccattgaggacgaggctcgcttcggtcgtatccgtgaccttgaagctaagcacttcaagaaaaactatgaggaacaactcaacaagcgcgtagggcacgtctacaagaaagcatttatgcaagttgtcgaggctgacatgctctctaagggtctactcggtggcgaggcgtggtcttcgtggcataaggaagactctattcatgtaggagtacgctgcatcgagatgctcattgagtcaaccggaatggttagcttacaccgccaaaatgctggcgtagtaggtcaagactctgagactatcgaactcgcacctgaatacgctgaggctatcgcaacccgtgcaggtgcgctggctggcatctctccgatgttccaaccttgcgtagttcctcctaagccgtggactggcattactggtggtggctattgggctaacggtcgtcgtcctctggcgctggtgcgtactcacagtaagaaaggtctgatgcgctacgaagacgtttacatgcctgaggtgtacaaagcgattaacattgcgcaaaacaccgcctggtcgatcaacaagtgggtcctggcggtcgccaacgtaatcaccaagtggaagcattgtccggtccgggacatccctgcgattgagcgtgaagaactcccgatgaaaccggaagacatcgacatgaatcctgaggctctcaccgcgtggaaacgtgctaaagctgctgtgtaccgcagagacaaggctcgcaagtctcgccgtatcttgcttgagttcatgcttgagcaagccaataagtttgctaaccataaggccatctggttcccttacaacatggactggcgcggtcgtgtttacgctgtgtcaatgttcaacccgcaaggtaacgatatgaccaaaggactgcttacgctggcgaaaggtaaaccaatcggtaaggaaggttactactggctgaaaatccacggtgcaaactgtgcgggtgtcgataaggttccgttccctgagcgcatcaagttcattgaggaaaaccacgagaacatcatggcttgcgctaagtctccactggagaacacttggtgggctgagcaagatagtccgttctgcttccttgcgttctgctttgagtacgctggggtacagcaccacggcctgagctataactgctcccttccgctggcgtttgacgggtcttgctctggcatccagcacttctccgcgatgctccgagatgaggtaggtggtcgcgcggttaacttgcttcctagtgaaaccgttcaggacatctacgggattgttgctaagaaagtcaacgagattctacaagcagacgcaatcaatgggaccgataacgaagtagttaccgtgaccgatgagaacactggtgaaatctctgagaaagtcaagctgggcactaaggcactggctggtcaatggctggcttacggtgttactcgcagtgtgactaagcgttcagtcatgacgctggcttacgggtccaaagagttcggcttccgtcaacaagtgctggaagacactattcagtgggctattgattccggcaagggtctgatgttcactcagccgaatcaggctgctggatacatggctaagctgatttgggaatctgtgagcgtgacggtggtagctgcggttgaagcaatgaactggcttaagtctgctgctaagctgctggctgctgaggtcaaagataagaagactggagagattcttcgcaagcgttgcgctgtgcattgggtaactcctgatggtttccctgtgtggcaggaatacaagaagcctattcagacgcgcttgaacctgatgttcctcggtcagttccgcttacagcctaccattaacaccaacaaagatagcgagattgatgcacacaaacaggagtctggtatcgctcctaactttgtacacagccaagacggtagccaccttcgtaagactgtagtgtgggcacacgagaagtacggaatcgaatcttttgcactgattcacgactccttcggtaccattccggctgacgctgcgaacctgttcaaagcagtgcgcgaaactatggttgacacatatgagtcttgtgatgtactggctgatttctacgaccagttcgctgaccagttgcacgagtctcaattggacaaaatgccagcacttccggctaaaggtaacttgaacctccgtgacatcttagagtcggacttcgcgttcgcg

SEQ ID NO: 170 - protein, 890 aa, synthetic construct
  REGION 1..890: note = Variant of RNA polymerase
MHHHHHHMNTINIAKNDFSDIELAAIPFNTLADHYGERLAREQLALEHESYEMGEAGFRKMFERQLKAGEVADNAAAKPLITTLLPKMIARINDWFEEVKAKRGKRPTAFQFLQEIKPEAVAYITIKTTLACLTSADRTTVQAVASAIGRAIEDEARFGRIRDLEAKHFKKNYEEQLNKRVGHVYKKAFMQVVEADMLSKGLLGGEAWSSWHKEDSIHVGVRCIEMLIESTGMVSLHRQNAGVVGQDSETIELAPEYAEAIATRAGALAGISPMFQPCVVPPKPWTGITGGGYWANGRRPLALVRTHSKKGLMRYEDVYMPEVYKAINIAQNTAWSINKWVLAVANVITKWKHCPVRDIPAIEREELPMKPEDIDMNPEALTAWKRAKAAVYRRDKARKSRRILLEFMLEQANKFANHKAIWFPYNMDWRGRVYAVSMFNPQGNDMTKGLLTLAKGKPIGKEGYYWLKIHGANCAGVDKVPFPERIKFIEENHENIMACAKSPLENTWWAEQDSPFCFLAFCFEYAGVQHHGLSYNCSLPLAFDGSCSGIQHFSAMLRDEVGGRAVNLLPSETVQDIYGIVAKKVNEILQADAINGTDNEVVTVTDENTGEISEKVKLGTKALAGQWLAYGVTRSVTKRSVMTLAYGSKEFGFRQQVLEDTIQWAIDSGKGLMFTQPNQAAGYMAKLIWESVSVTVVAAVEAMNWLKSAAKLLAAEVKDKKTGEILRKRCAVHWVTPDGFPVWQEYKKPIQTRLNLMFLGQFRLQPTINTNKDSEIDAHKQESGIAPNFVHSQDGSHLRKTVVWAHEKYGIESFALIHDSFGTIPADAANLFKAVRETMVDTYESCDVLADFYDQFADQLHESQLDKMPALPAKGNLNLRDILESDFAFA

SEQ ID NO: 171 - DNA, 2670 bp, synthetic construct
  misc_feature 1..2670: note = Variant of RNA polymerase
  source 1..2670: mol_type = other DNA
atgcaccatcaccatcaccatatgaacacgattaacatcgctaagaacgacttctctgacatcgaactggctgctatcccgttcaacactctggctgaccattacggtgagcgtttagctcgcgaacagttggcccttgagcatgagtcttacgagatgggtgaagcacgtttccgcaagatgtttgagcgtcaacttaaagctggtgaggttgcggataacgctgccgccaagcctctcatcactaccctactccctaagatgattgcacgcatcaacgactggtttgaggaagtgaaagctaagcgcggcaagcgcccgacagccttccagttcctgcaagaaatcaagccggaagccgtagcgtacatcaccattaagaccactctggcttgcctaaccagtgcggaccgtacaaccgttcaggctgtagcaagcgcaatcggtcgggccattgaggacgaggctcgcttcggtcgtatccgtgaccttgaagctaagcacttcaaaaaaaaagatgaggaacaactcaacaagcgcgtagggcacgtctacaagaaagcatttatgcaagttgtcgaggctgacatgctctctaagggtctactcggtggcgaggcgtggtcttcgtggcataaggaagactctattcatgtaggagtacgctgcatcgagatgctcattgagtcaaccggaatggttagcttacaccgccaaaatgctggcgtagtaggtcaagactctgagactatcgaactcgcacctgaatacgctgaggctatcgcaacccgtgcaggtgcgctggctggcatctctccgatgttccaaccttgcgtagttcctcctaagccgtggactggcattactggtggtggctattgggctaacggtcgtcgtcctctggcgctggtgcgtactcacagtaagaaaggtctgatgcgctacgaagacgtttacatgcctgaggtgtacaaagcgattaacattgcgcaaaacaccgcctggtcgatcaacaagtgggtcctggcggtcgccaacgtaatcaccaagtggaagcattgtccggtccgggacatccctgcgattgagcgtgaagaactcccgatgaaaccggaagacatcgacatgaatcctgaggctctcaccgcgtggaaacgtgctaaagctgctgtgtaccgcagagacaaggctcgcaagtctcgccgtatcttgcttgagttcatgcttgagcaagccaataagtttgctaaccataaggccatctggttcccttacaacatggactggcgcggtcgtgtttacgctgtgtcaatgttcaacccgcaaggtaacgatatgaccaaaggactgcttacgctggcgaaaggtaaaccaatcggtaaggaaggttactactggctgaaaatccacggtgcaaactgtgcgggtgtcgataaggttccgttccctgagcgcatcaagttcattgaggaaaaccacgagaacatcatggcttgcgctaagtctccactggagaacacttggtgggctgagcaagatagtccgttctgcttccttgcgttctgctttgagtacgctggggtacagcaccacggcctgagctataactgctcccttccgctggcgtttgacgggtcttgctctggcatccagcacttctccgcgatgctccgagatgaggtaggtggtcgcgcggttaacttgcttcctagtgaaaccgttcaggacatctacgggattgttgctaagaaagtcaacgagattctacaagcagacgcaatcaatgggaccgataacgaagtagttaccgtgaccgatgagaacactggtgaaatctctgagaaagtcaagctgggcactaaggcactggctggtcaatggctggcttacggtgttactcgcagtgtgactaagcgttcagtcatgacgctggcttacgggtccaaagagttcggcttccgtcaacaagtgctggaagatactattcagtgggctattgattccggcaagggtctgatgttcactcagccgaatcaggctgctggatacatggctaagctgatttgggaatctgtgagcgtgacggtggtagctgcggttgaagcaatgaactggcttaagtctgctgctaagctgctggctgctgaggtcaaagataagaagactggagagattcttcgcaagcgttgcgctgtgcattgggtaactcctgatggtttccctgtgtggcaggaatacaagaagcctattcagacgcgcttgaacctgatgttcctcggtcagttccgcttacagcctaccattaacaccaacaaagatagcgagattgatgcacacaaacaggagtctggtatcgctcctaactttgtacacagccaagacggtagccaccttcgtaagactgtagtgtgggcacacgagaagtacggaatcgaatcttttgcactgattcacgactccttcggtaccattccggctgacgctgcgaacctgttcaaagcagtgcgcgaaactatggttgacacatatgagtcttgtgatgtactggctgatttctacgaccagttcgttgaccagttgcacgagtctcaattggacaaaatgccagcacttccggctaaaggtaacttgaacctccgtgacatcttagagtcggacttcgcgttcgcg

SEQ ID NO: 172 - protein, 890 aa, synthetic construct
  REGION 1..890: note = Variant of RNA polymerase
MHHHHHHMNTINIAKNDFSDIELAAIPFNTLADHYGERLAREQLALEHESYEMGEARFRKMFERQLKAGEVADNAAAKPLITTLLPKMIARINDWFEEVKAKRGKRPTAFQFLQEIKPEAVAYITIKTTLACLTSADRTTVQAVASAIGRAIEDEARFGRIRDLEAKHFKKKDEEQLNKRVGHVYKKAFMQVVEADMLSKGLLGGEAWSSWHKEDSIHVGVRCIEMLIESTGMVSLHRQNAGVVGQDSETIELAPEYAEAIATRAGALAGISPMFQPCVVPPKPWTGITGGGYWANGRRPLALVRTHSKKGLMRYEDVYMPEVYKAINIAQNTAWSINKWVLAVANVITKWKHCPVRDIPAIEREELPMKPEDIDMNPEALTAWKRAKAAVYRRDKARKSRRILLEFMLEQANKFANHKAIWFPYNMDWRGRVYAVSMFNPQGNDMTKGLLTLAKGKPIGKEGYYWLKIHGANCAGVDKVPFPERIKFIEENHENIMACAKSPLENTWWAEQDSPFCFLAFCFEYAGVQHHGLSYNCSLPLAFDGSCSGIQHFSAMLRDEVGGRAVNLLPSETVQDIYGIVAKKVNEILQADAINGTDNEVVTVTDENTGEISEKVKLGTKALAGQWLAYGVTRSVTKRSVMTLAYGSKEFGFRQQVLEDTIQWAIDSGKGLMFTQPNQAAGYMAKLIWESVSVTVVAAVEAMNWLKSAAKLLAAEVKDKKTGEILRKRCAVHWVTPDGFPVWQEYKKPIQTRLNLMFLGQFRLQPTINTNKDSEIDAHKQESGIAPNFVHSQDGSHLRKTVVWAHEKYGIESFALIHDSFGTIPADAANLFKAVRETMVDTYESCDVLADFYDQFVDQLHESQLDKMPALPAKGNLNLRDILESDFAFA

SEQ ID NO: 173 - DNA, 2670 bp, synthetic construct
  misc_feature 1..2670: note = Variant of RNA polymerase
  source 1..2670: mol_type = other DNA
atgcaccatcaccatcaccatatgaacacgattaacatcgctaagaacgacttctctgacatcgaactggctgctatcccgttcaacactctggctgaccattacggtgagcgtttagctcgcgaacagttggcccttgagcatgagtcttacgagatgggtgaagcaggtttccgcaagatgtttgagcgtcaacttaaagctggtgaggttgcggataacgctgccgccaagcctctcatcactaccctactccctaagatgattgcacgcatcaacgactggtttgaggaagtgaaagctaagcgcggcaagcgcccgacagccttccagttcctgcaagaaatcaagccggaagccgtagcgtacatcaccattaagaccactctggcttgcctaaccagtgcggaccgtacaaccgttcaggctgtagcaagcgcaatcggtcgggccattgaggacgaggctcgcttcggtcgtatccgtgaccttgaagctaagcacttcaagaaaaactatgaggaacaactcaacaagcgcgtagggcacgtctacaagaaagcatttatgcaagttgtcgaggctgacatgctctctaagggtctactcggtggcgaggcgtggtcttcgtggcataaggaagactctattcatgtaggagtacgctgcatcgagatgctcattgagtcaaccggaatggttagcttacaccgccaaaatgctggcgtagtaggtcaagactctgagactatcgaactcgcacctgaatacgctgaggctatcgcaacccgtgcaggtgcgctggctggcatctctccgatgttccaaccttgcgtagttcctcctaagccgtggactggcattactggtggtggctattgggctaacggtcgtcgtcctctggcgctggtgcgtactcacagtaagaaaggtctgatgcgctacgaagacgtttacatgcctgaggtgtacaaagcgattaacattgcgcaaaacaccgcctggtcgatcaacaagaaagtcctggcggtcgccaacgtaatcaccaagtggaagcattgtccggtccgggacatccctgcgattgagcgtgaagaactcccgatgaaaccggaagacatcgacatgaatcctgaggctctcaccgcgtggaaacgtgctaaagctgctgtgtaccgcagagacaaggctcgcaagtctcgccgtatcttgcttgagttcatgcttgagcaagccaataagtttgctaaccataaggccatctggttcccttacaacatggactggcgcggtcgtgtttacgctgtgtcaatgttcaacccgcaaggtaacgatatgaccaaaggactgcttacgctggcgaaaggtaaaccaatcggtaaggaaggttactactggctgaaaatccacggtgcaaactgtgcgggtgtcgataaggttccgttccctgagcgcatcaagttcattgaggaaaaccacgagaacatcatggcttgcgctaagtctccactggagaacacttggtgggctgagcaagatagtccgttctgcttccttgcgttctgctttgagtacgctggggtacagcaccacggcctgagctataactgctcccttccgctggcgtttgacgggtcttgctctggcatccagcacttctccgcgatgctccgagatgaggtaggtggtcgcgcggttaacttgcttcctagtgaaaccgttcaggacatctacgggattgttgctaagaaagtcaacgagattctacaagcagacgcaatcaatgggaccgataacgaagtagttaccgtgaccgatgagaacactggtgaaatctctgagaaagtcaagctgggcactaaggcactggctggtcaatggctggcttacggtgttactcgcagtgtgactaagcgttcagtcatgacgctggcttacgggtccaaagagttcggcttccgtcaacaagtgctggaagatactattcagtgggctattgattccggcaagggtctgatgttcactcagccgaatcaggctgctggatacatggctaagctgatttgggaatctgtgagcgtgacggtggtagctgcggttgaagcaatgaactggcttaagtctgctgctaagctgctggctgctgaggtcaaagataagaagactggagagattcttcgcaagcgttgcgctgtgcattgggtaactcctgatggtttccctgtgtggcaggaatacaagaagcctattcagacgcgcttgaacctgatgttcctcggtcagttccgcttacagcctaccattaacaccaacaaagatagcgagattgatgcacacaaacaggagtctggtatcgctcctaactttgtacacagccaagacggtagccaccttcgtaagactgtagtgtgggcacacgagaagtacggaatcgaatcttttgcactgattcacgactccttcggtaccattccggctgacgctgcgaacctgttcaaagcagtgcgcgaaactatggttgacacatatgagtcttgtgatgtactggctgatttctacgaccagttcgctgaccagttgcacgagtctcaattggacaaaatgccagcacttccggctaaaggtaacttgaacctccgtgacatcttagagtcggacttcgcgttcgcg

SEQ ID NO: 174 - protein, 890 aa, synthetic construct
  REGION 1..890: note = Variant of RNA polymerase
MHHHHHHMNTINIAKNDFSDIELAAIPFNTLADHYGERLAREQLALEHESYEMGEAGFRKMFERQLKAGEVADNAAAKPLITTLLPKMIARINDWFEEVKAKRGKRPTAFQFLQEIKPEAVAYITIKTTLACLTSADRTTVQAVASAIGRAIEDEARFGRIRDLEAKHFKKNYEEQLNKRVGHVYKKAFMQVVEADMLSKGLLGGEAWSSWHKEDSIHVGVRCIEMLIESTGMVSLHRQNAGVVGQDSETIELAPEYAEAIATRAGALAGISPMFQPCVVPPKPWTGITGGGYWANGRRPLALVRTHSKKGLMRYEDVYMPEVYKAINIAQNTAWSINKKVLAVANVITKWKHCPVRDIPAIEREELPMKPEDIDMNPEALTAWKRAKAAVYRRDKARKSRRILLEFMLEQANKFANHKAIWFPYNMDWRGRVYAVSMFNPQGNDMTKGLLTLAKGKPIGKEGYYWLKIHGANCAGVDKVPFPERIKFIEENHENIMACAKSPLENTWWAEQDSPFCFLAFCFEYAGVQHHGLSYNCSLPLAFDGSCSGIQHFSAMLRDEVGGRAVNLLPSETVQDIYGIVAKKVNEILQADAINGTDNEVVTVTDENTGEISEKVKLGTKALAGQWLAYGVTRSVTKRSVMTLAYGSKEFGFRQQVLEDTIQWAIDSGKGLMFTQPNQAAGYMAKLIWESVSVTVVAAVEAMNWLKSAAKLLAAEVKDKKTGEILRKRCAVHWVTPDGFPVWQEYKKPIQTRLNLMFLGQFRLQPTINTNKDSEIDAHKQESGIAPNFVHSQDGSHLRKTVVWAHEKYGIESFALIHDSFGTIPADAANLFKAVRETMVDTYESCDVLADFYDQFADQLHESQLDKMPALPAKGNLNLRDILESDFAFA

SEQ ID NO: 175 - DNA, 2670 bp, synthetic construct
  misc_feature 1..2670: note = Variant of RNA polymerase
  source 1..2670: mol_type = other DNA
atgcaccatcaccatcaccatatgaacacgattaacatcgctaagaacgacttctctgacatcgaactggctgctatcccgttcaacactctggctgaccattacggtgagcgtttagctcgcgaacagttggcccttgagcatgagtcttacgagatgggtgaagcacgtttccgcaagatgtttgagcgtcaacttaaagctggtgaggttgcggataacgctgccgccaagcctctcatcactaccctactccctaagatgattgcacgcatcaacgactggtttgaggaagtgaaagctaagcgcggcaagcgcccgacagccttccagttcctgcaagaaatcaagccggaagccgtagcgtacatcaccattaagaccactctggcttgcctaaccagtgcggaccgtacaaccgttcaggctgtagcaagcgcaatcggtcgggccattgaggacgaggctcgcttcggtcgtatccgtgaccttgaagctaagcacttccaagaaaactatgaggaacaactcaacaagcgcgtagggcacgtctacaagaaagcatttatgcaagttgtcgaggctgacatgctctctaagggtctactcggtggcgaggcgtggtcttcgtggcataaggaagactctattcatgtaggagtacgctgcatcgagatgctcattgagtcaaccggaatggttagcttacaccgccaaaatgctggcgtagtaggtcaagactctgagactatcgaactcgcacctgaatacgctgaggctatcgcaacccgtgcaggtgcgctggctggcatctctccgatgttccaaccttgcgtagttcctcctaagccgtggactggcattactggtggtggctattgggctaacggtcgtcgtcctctggcgctggtgcgtactcacagtaagaaaggtctgatgcgctacgaagacgtttacatgcctgaggtgtacaaagcgattaacattgcgcaaaacaccgcctggaagatcaacaagtgggtcctggcggtcgccaacgtaatcaccaagtggaagcattgtccggtccgggacatccctgcgattgagcgtgaagaactcccgatgaaaccggaagacatcgacatgaatcctgaggctctcaccgcgtggaaacgtgctaaagctgctgtgtaccgcagagacaaggctcgcaagtctcgccgtatcttgcttgagttcatgcttgagcaagccaataagtttgctaaccataaggccatctggttcccttacaacatggactggcgcggtcgtgtttacgctgtgtcaatgttcaacccgcaaggtaacgatatgaccaaaggactgcttacgctggcgaaaggtaaaccaatcggtaaggaaggttactactggctgaaaatccacggtgcaaactgtgcgggtgtcgataaggttccgttccctgagcgcatcaagttcattgaggaaaaccacgagaacatcatggcttgcgctaagtctccactggagaacacttggtgggctgagcaagatagtccgttctgcttccttgcgttctgctttgagtacgctggggtacagcaccacggcctgagctataactgctcccttccgctggcgtttgacgggtcttgctctggcatccagcacttctccgcgatgctccgagatgaggtaggtggtcgcgcggttaacttgcttcctagtgaaaccgttcaggacatctacgggattgttgctaagaaagtcaacgagattctacaagcagacgcaatcaatgggaccgataacgaagtagttaccgtgaccgatgagaacactggtgaaatctctgagaaagtcaagctgggcactaaggcactggctggtcaatggctggcttacggtgttactcgcagtgtgactaagcgttcagtcatgacgctggcttacgggtccaaagagttcggcttccgtcaacaagtgctggaagacactattcagtgggctattgattccggcaagggtctgatgttcactcagccgaatcaggctgctggatacatggctaagctgatttgggaatctgtgagcgtgacggtggtagctgcggttgaagcaatgaactggcttaagtctgctgctaagctgctggctgctgaggtcaaagataagaagactggagagattcttcgcaagcgttgcgctgtgcattgggtaactcctgatggtttccctgtgtggcaggaatacaagaagcctattcagacgcgcttgaacctgatgttcctcggtcagttccgcttacagcctaccattaacaccaacaaagatagcgagattgatgcacacaaacaggagtctggtatcgctcctaactttgtacacagccaagacggtagccaccttcgtaagactgtagtgtgggcacacgagaagtacggtatcgaatcttttgcactgattcacgactccttcggtaccattccggctgacgctgcgaacctgttcaaagcagtgcgcgaaactatggttgacacatatgagtcttgtgatgtactggctgatttctacgaccagttcgctgaccagttgcacgagtctcaattggacaaaatgccagcacttccggctaaaggtaacttgaacctccgtgacatcttagagtcggacttcgcgttcgcg

SEQ ID NO: 176 - protein, 890 aa, synthetic construct
  REGION 1..890: note = Variant of RNA polymerase
MHHHHHHMNTINIAKNDFSDIELAAIPFNTLADHYGERLAREQLALEHESYEMGEARFRKMFERQLKAGEVADNAAAKPLITTLLPKMIARINDWFEEVKAKRGKRPTAFQFLQEIKPEAVAYITIKTTLACLTSADRTTVQAVASAIGRAIEDEARFGRIRDLEAKHFQENYEEQLNKRVGHVYKKAFMQVVEADMLSKGLLGGEAWSSWHKEDSIHVGVRCIEMLIESTGMVSLHRQNAGVVGQDSETIELAPEYAEAIATRAGALAGISPMFQPCVVPPKPWTGITGGGYWANGRRPLALVRTHSKKGLMRYEDVYMPEVYKAINIAQNTAWKINKWVLAVANVITKWKHCPVRDIPAIEREELPMKPEDIDMNPEALTAWKRAKAAVYRRDKARKSRRILLEFMLEQANKFANHKAIWFPYNMDWRGRVYAVSMFNPQGNDMTKGLLTLAKGKPIGKEGYYWLKIHGANCAGVDKVPFPERIKFIEENHENIMACAKSPLENTWWAEQDSPFCFLAFCFEYAGVQHHGLSYNCSLPLAFDGSCSGIQHFSAMLRDEVGGRAVNLLPSETVQDIYGIVAKKVNEILQADAINGTDNEVVTVTDENTGEISEKVKLGTKALAGQWLAYGVTRSVTKRSVMTLAYGSKEFGFRQQVLEDTIQWAIDSGKGLMFTQPNQAAGYMAKLIWESVSVTVVAAVEAMNWLKSAAKLLAAEVKDKKTGEILRKRCAVHWVTPDGFPVWQEYKKPIQTRLNLMFLGQFRLQPTINTNKDSEIDAHKQESGIAPNFVHSQDGSHLRKTVVWAHEKYGIESFALIHDSFGTIPADAANLFKAVRETMVDTYESCDVLADFYDQFADQLHESQLDKMPALPAKGNLNLRDILESDFAFA

SEQ ID NO: 177 - DNA, 2670 bp, synthetic construct
  misc_feature 1..2670: note = Variant of RNA polymerase
  source 1..2670: mol_type = other DNA
atgcaccatcaccatcaccatatgaacacgattaacatcgctaagaacgacttctctgacatcgaactggctgctatcccgttcaacactctggctgaccattacggtgagcgtttagctcgcgaacagttggcccttgagcatgagtcttacgagatgggtgaagcacgtttccgcaagatgtttgagcgtcaacttaaagctggtgaggttgcggataacgctgccgccaagcctctcatcactaccctactccctaagatgattgcacgcatcaacgactggtttgaggaagtgaaagctaagcgcggcaagcgcccgacagccttccagttcctgcaagaaatcaagccggaagccgtagcgtacatcaccattaagaccactctggcttgcctaaccagtgcggaccgtacaaccgttcaggctgtagcaagcgcaatcggtcgggccattgaggacgaggctcgcttcggtcgtatccgtgaccttgaagctaagcacttcaaagaaaacgttgaggaacaactcaacaagcgcgtagggcacgtctacaagaaagcatttatgcaagttgtcgaggctgacatgctctctaagggtctactcggtggcgaggcgtggtcttcgtggcataaggaagactctattcatgtaggagtacgctgcatcgagatgctcattgagtcaaccggaatggttagcttacaccgccaaaatgctggcgtagtaggtcaagactctgagactatcgaactcgcacctgaatacgctgaggctatcgcaacccgtgcaggtgcgctggctggcatctctccgatgttccaaccttgcgtagttcctcctaagccgtggactggcattactggtggtggctattgggctaacggtcgtcgtcctctggcgctggtgcgtactcacagtaagaaaggtctgatgcgctacgaagacgtttacatgcctgaggtgtacaaagcgattaacattgcgcaaaacaccgcctggtcgatcaacaagtgggtcctggcggtcgccaacgtaatcaccaagtggaagcattgtccggtccgggacatccctgcgattgagcgtgaagaactcccgatgaaaccggaagacatcgacatgaatcctgaggctctcaccgcgtggaaacgtgctaaagctgctgtgtaccgcagagacaaggctcgcaagtctcgccgtatcttgcttgagttcatgcttgagcaagccaataagtttgctaaccataaggccatctggttcccttacaacatggactggcgcggtcgtgtttacgctgtgtcaatgttcaacccgcaaggtaacgatatgaccaaaggactgcttacgctggcgaaaggtaaaccaatcggtaaggaaggttactactggctgaaaatccacggtgcaaactgtgcgggtgtcgataaggttccgttccctgagcgcatcaagttcattgaggaaaaccacgagaacatcatggcttgcgctaagtctccactggagaacacttggtgggctgagcaagatagtccgttctgcttccttgcgttctgctttgagtacgctggggtacagcaccacggcctgagctataactgctcccttccgctggcgtttgacgggtcttgctctggcatccagcacttctccgcgatgctccgagatgaggtaggtggtcgcgcggttaacttgcttcctagtgaaaccgttcaggacatctacgggattgttgctaagaaagtcaacgagattctacaagcagacgcaatcaatgggaccgataacgaagtagttaccgtgaccgatgagaacactggtgaaatctctgagaaagtcaagctgggcactaaggcactggctggtcaatggctggcttacggtgttactcgcagtgtgactaagcgttcagtcatgacgctggcttacgggtccaaagagttcggcttccgtcaacaagtgctggaagacactattcagtgggctattgattccggcaagggtctgatgttcactcagccgaatcaggctgctggatacatggctaagctgatttgggaatctgtgagcgtgacggtggtagctgcggttgaagcaatgaactggcttaagtctgctgctaagctgctggctgctgaggtcaaagataagaagactggagagattcttcgcaagcgttgcgctgtgcattgggtaactcctgatggtttccctgtgtggcaggaatacaagaagcctattcagacgcgcttgaacctgatgttcctcggtcagttccgcttacagcctaccattaacaccaacaaagatagcgagattgatgcacacaaacaggagtctggtatcgctcctaactttgtacacagccaagacggtagccaccttcgtaagactgtagtgtgggcacacgagaagtacggtatcgaatcttttgcactgattcacgactccttcggtaccattccggctgacgctgcgaacctgttcaaagcagtgcgcgaaactatggttgacacatatgagtcttgtgatgtactggctgatttctacgaccagttcgctgaccagttgcacgagtctcaattggacaaaatgccagcacttccggctaaaggtaacttgaacctccgtgacatcttagagtcggacttcgcgttcgcg

SEQ ID NO: 178 - protein, 890 aa, synthetic construct
  REGION 1..890: note = Variant of RNA polymerase
MHHHHHHMNTINIAKNDFSDIELAAIPFNTLADHYGERLAREQLALEHESYEMGEARFRKMFERQLKAGEVADNAAAKPLITTLLPKMIARINDWFEEVKAKRGKRPTAFQFLQEIKPEAVAYITIKTTLACLTSADRTTVQAVASAIGRAIEDEARFGRIRDLEAKHFKENVEEQLNKRVGHVYKKAFMQVVEADMLSKGLLGGEAWSSWHKEDSIHVGVRCIEMLIESTGMVSLHRQNAGVVGQDSETIELAPEYAEAIATRAGALAGISPMFQPCVVPPKPWTGITGGGYWANGRRPLALVRTHSKKGLMRYEDVYMPEVYKAINIAQNTAWSINKWVLAVANVITKWKHCPVRDIPAIEREELPMKPEDIDMNPEALTAWKRAKAAVYRRDKARKSRRILLEFMLEQANKFANHKAIWFPYNMDWRGRVYAVSMFNPQGNDMTKGLLTLAKGKPIGKEGYYWLKIHGANCAGVDKVPFPERIKFIEENHENIMACAKSPLENTWWAEQDSPFCFLAFCFEYAGVQHHGLSYNCSLPLAFDGSCSGIQHFSAMLRDEVGGRAVNLLPSETVQDIYGIVAKKVNEILQADAINGTDNEVVTVTDENTGEISEKVKLGTKALAGQWLAYGVTRSVTKRSVMTLAYGSKEFGFRQQVLEDTIQWAIDSGKGLMFTQPNQAAGYMAKLIWESVSVTVVAAVEAMNWLKSAAKLLAAEVKDKKTGEILRKRCAVHWVTPDGFPVWQEYKKPIQTRLNLMFLGQFRLQPTINTNKDSEIDAHKQESGIAPNFVHSQDGSHLRKTVVWAHEKYGIESFALIHDSFGTIPADAANLFKAVRETMVDTYESCDVLADFYDQFADQLHESQLDKMPALPAKGNLNLRDILESDFAFA

SEQ ID NO: 179 - DNA, 2670 bp, synthetic construct
  misc_feature 1..2670: note = Variant of RNA polymerase
  source 1..2670: mol_type = other DNA
atgcaccatcaccatcaccatatgaacacgattaacatcgctaagaacgacttctctgacatcgaactggctgctatcccgttcaacactctggctgaccattacggtgagcgtttagctcgcgaacagttggcccttgagcatgagtcttacgagatgggtgaagcaggtttccgcaagatgtttgagcgtcaacttaaagctggtgaggttgcggataacgctgccgccaagcctctcatcactaccctactccctaagatgattgcacgcatcaacgactggtttgaggaagtgaaagctaagcgcggcaagcgcccgacagccttccagttcctgcaagaaatcaagccggaagccgtagcgtacatcaccattaagaccactctggcttgcctaaccagtgcggaccgtacaaccgttcaggctgtagcaagcgcaatcggtcgggccattgaggacgaggctcgcttcggtcgtatccgtgaccttgaagctaagcacttccaaaaaaactatgaggaacaactcaacaagcgcgtagggcacgtctacaagaaagcatttatgcaagttgtcgaggctgacatgctctctaagggtctactcggtggcgaggcgtggtcttcgtggcataaggaagactctattcatgtaggagtacgctgcatcgagatgctcattgagtcaaccggaatggttagcttacaccgccaaaatgctggcgtagtaggtcaagactctgagactatcgaactcgcacctgaatacgctgaggctatcgcaacccgtgcaggtgcgctggctggcatctctccgatgttccaaccttgcgtagttcctcctaagccgtggactggcattactggtggtggctattgggctaacggtcgtcgtcctctggcgctggtgcgtactcacagtaagaaaggtctgatgcgctacgaagacgtttacatgcctgaggtgtacaaagcgattaacattgcgcaaaacaccgcctggaagatcaacaagtgggtcctggcggtcgccaacgtaatcaccaagtggaagcattgtccggtccgggacatccctgcgattgagcgtgaagaactcccgatgaaaccggaagacatcgacatgaatcctgaggctctcaccgcgtggaaacgtgctaaagctgctgtgtaccgcagagacaaggctcgcaagtctcgccgtatcttgcttgagttcatgcttgagcaagccaataagtttgctaaccataaggccatctggttcccttacaacatggactggcgcggtcgtgtttacgctgtgtcaatgttcaacccgcaaggtaacgatatgaccaaaggactgcttacgctggcgaaaggtaaaccaatcggtaaggaaggttactactggctgaaaatccacggtgcaaactgtgcgggtgtcgataaggttccgttccctgagcgcatcaagttcattgaggaaaaccacgagaacatcatggcttgcgctaagtctccactggagaacacttggtgggctgagcaagatagtccgttctgcttccttgcgttctgctttgagtacgctggggtacagcaccacggcctgagctataactgctcccttccgctggcgtttgacgggtcttgctctggcatccagcacttctccgcgatgctccgagatgaggtaggtggtcgcgcggttaacttgcttcctagtgaaaccgttcaggacatctacgggattgttgctaagaaagtcaacgagattctacaagcagacgcaatcaatgggaccgataacgaagtagttaccgtgaccgatgagaacactggtgaaatctctgagaaagtcaagctgggcactaaggcactggctggtcaatggctggcttacggtgttactcgcagtgtgactaagcgttcagtcatgacgctggcttacgggtccaaagagttcggcttccgtcaacaagtgctggaggacactattcagtgggctattgattccggcaagggtctgatgttcactcagccgaatcaggctgctggatacatggctaagctgatttgggaatctgtgagcgtgacggtggtagctgcggttgaagcaatgaactggcttaagtctgctgctaagctgctggctgctgaggtcaaagataagaagactggagagattcttcgcaagcgttgcgctgtgcattgggtaactcctgatggtttccctgtgtggcaggaatacaagaagcctattcagacgcgcttgaacctgatgttcctcggtcagttccgcttacagcctaccattaacaccaacaaagatagcgagattgatgcacacaaacaggagtctggtatcgctcctaactttgtacacagccaagacggtagccaccttcgtaagactgtagtgtgggcacacgagaagtacggtatcgaatcttttgcactgattcacgactccttcggtaccattccggctgacgctgcgaacctgttcaaagcagtgcgcgaaactatggttgacacatatgagtcttgtgatgtactggctgatttctacgaccagttcgctgaccagttgcacgagtctcaattggacaaaatgccagcacttccggctaaaggtaacttgaacctccgtgacatcttagagtcggacttcgcgttcgcg

SEQ ID NO: 180 - protein, 890 aa, synthetic construct
  REGION 1..890: note = Variant of RNA polymerase
MHHHHHHMNTINIAKNDFSDIELAAIPFNTLADHYGERLAREQLALEHESYEMGEAGFRKMFERQLKAGEVADNAAAKPLITTLLPKMIARINDWFEEVKAKRGKRPTAFQFLQEIKPEAVAYITIKTTLACLTSADRTTVQAVASAIGRAIEDEARFGRIRDLEAKHFQKNYEEQLNKRVGHVYKKAFMQVVEADMLSKGLLGGEAWSSWHKEDSIHVGVRCIEMLIESTGMVSLHRQNAGVVGQDSETIELAPEYAEAIATRAGALAGISPMFQPCVVPPKPWTGITGGGYWANGRRPLALVRTHSKKGLMRYEDVYMPEVYKAINIAQNTAWKINKWVLAVANVITKWKHCPVRDIPAIEREELPMKPEDIDMNPEALTAWKRAKAAVYRRDKARKSRRILLEFMLEQANKFANHKAIWFPYNMDWRGRVYAVSMFNPQGNDMTKGLLTLAKGKPIGKEGYYWLKIHGANCAGVDKVPFPERIKFIEENHENIMACAKSPLENTWWAEQDSPFCFLAFCFEYAGVQHHGLSYNCSLPLAFDGSCSGIQHFSAMLRDEVGGRAVNLLPSETVQDIYGIVAKKVNEILQADAINGTDNEVVTVTDENTGEISEKVKLGTKALAGQWLAYGVTRSVTKRSVMTLAYGSKEFGFRQQVLEDTIQWAIDSGKGLMFTQPNQAAGYMAKLIWESVSVTVVAAVEAMNWLKSAAKLLAAEVKDKKTGEILRKRCAVHWVTPDGFPVWQEYKKPIQTRLNLMFLGQFRLQPTINTNKDSEIDAHKQESGIAPNFVHSQDGSHLRKTVVWAHEKYGIESFALIHDSFGTIPADAANLFKAVRETMVDTYESCDVLADFYDQFADQLHESQLDKMPALPAKGNLNLRDILESDFAFA

SEQ ID NO: 181 - DNA, 2670 bp, synthetic construct
  misc_feature 1..2670: note = Variant of RNA polymerase
  source 1..2670: mol_type = other DNA
atgcaccatcaccatcaccatatgaacacgattaacatcgctaagaacgacttctctgacatcgaactggctgctatcccgttcaacactctggctgaccattacggtgagcgtttagctcgcgaacagttggcccttgagcatgagtcttacgagatgggtgaagcacgtttccgcaagatgtttgagcgtcaacttaaagctggtgaggttgcggataacgctgccgccaagcctctcatcactaccctactccctaagatgattgcacgcatcaacgactggtttgaggaagtgaaagctaagcgcggcaagcgcccgacagccttccagttcctgcaagaaatcaagccggaagccgtagcgtacatcaccattaagaccactctggcttgcctaaccagtgcggaccgtacaaccgttcaggctgtagcaagcgcaatcggtcgggccattgaggacgaggctcgcttcggtcgtatccgtgaccttgaagctaagcacttccaaaaaaacgttgaggaacaactcaacaagcgcgtagggcacgtctacaagaaagcatttatgcaagttgtcgaggctgacatgctctctaagggtctactcggtggcgaggcgtggtcttcgtggcataaggaagactctattcatgtaggagtacgctgcatcgagatgctcattgagtcaaccggaatggttagcttacaccgccaaaatgctggcgtagtaggtcaagactctgagactatcgaactcgcacctgaatacgctgaggctatcgcaacccgtgcaggtgcgctggctggcatctctccgatgttccaaccttgcgtagttcctcctaagccgtggactggcattactggtggtggctattgggctaacggtcgtcgtcctctggcgctggtgcgtactcacagtaagaaaggtctgatgcgctacgaagacgtttacatgcctgaggtgtacaaagcgattaacattgcgcaaaacaccgcctggaagatcaacaagtgggtcctggcggtcgccaacgtaatcaccaagtggaagcattgtccggtccgggacatccctgcgattgagcgtgaagaactcccgatgaaaccggaagacatcgacatgaatcctgaggctctcaccgcgtggaaacgtgctaaagctgctgtgtaccgcagagacaaggctcgcaagtctcgccgtatcttgcttgagttcatgcttgagcaagccaataagtttgctaaccataaggccatctggttcccttacaacatggactggcgcggtcgtgtttacgctgtgtcaatgttcaacccgcaaggtaacgatatgaccaaaggactgcttacgctggcgaaaggtaaaccaatcggtaaggaaggttactactggctgaaaatccacggtgcaaactgtgcgggtgtcgataaggttccgttccctgagcgcatcaagttcattgaggaaaaccacgagaacatcatggcttgcgctaagtctccactggagaacacttggtgggctgagcaagatctgccgttctgcttccttgcgttctgctttgagtacgctggggtacagcaccacggcctgagctataactgctcccttccgctggcgtttgacgggtcttgctctggcatccagcacttctccgcgatgctccgagatgaggtaggtggtcgcgcggttaacttgcttcctagtgaaaccgttcaggacatctacgggattgttgctaagaaagtcaacgagattctacaagcagacgcaatcaatgggaccgataacgaagtagttaccgtgaccgatgagaacactggtgaaatctctgagaaagtcaagctgggcactaaggcactggctggtcaatggctggcttacggtgttactcgcagtgtgactaagcgttcagtcatgacgctggcttacgggtccaaagagttcggcttccgtcaacaagtgctggaggacactattcagtgggctattgattccggcaagggtctgatgttcactcagccgaatcaggctgctggatacatggctaagctgatttgggaatctgtgagcgtgacggtggtagctgcggttgaagcaatgaactggcttaagtctgctgctaagctgctggctgctgaggtcaaagataagaagactggagagattcttcgcaagcgttgcgctgtgcattgggtaactcctgatggtttccctgtgtggcaggaatacaagaagcctattcagacgcgcttgaacctgatgttcctcggtcagttccgcttacagcctaccattaacaccaacaaagatagcgagattgatgcacacaaacaggagtctggtatcgctcctaactttgtacacagccaagacggtagccaccttcgtaagactgtagtgtgggcacacgagaagtacggtatcgaatcttttgcactgattcacgactccttcggtaccattccggctgacgctgcgaacctgttcaaagcagtgcgcgaaactatggttgacacatatgagtcttgtgatgtactggctgatttctacgaccagttcgctgaccagttgcacgagtctcaattggacaaaatgccagcacttccggctaaaggtaacttgaacctccgtgacatcttagagtcggacttcgcgttcgcg

SEQ ID NO: 182 - protein, 890 aa, synthetic construct
  REGION 1..890: note = Variant of RNA polymerase
MHHHHHHMNTINIAKNDFSDIELAAIPFNTLADHYGERLAREQLALEHESYEMGEARFRKMFERQLKAGEVADNAAAKPLITTLLPKMIARINDWFEEVKAKRGKRPTAFQFLQEIKPEAVAYITIKTTLACLTSADRTTVQAVASAIGRAIEDEARFGRIRDLEAKHFQKNVEEQLNKRVGHVYKKAFMQVVEADMLSKGLLGGEAWSSWHKEDSIHVGVRCIEMLIESTGMVSLHRQNAGVVGQDSETIELAPEYAEAIATRAGALAGISPMFQPCVVPPKPWTGITGGGYWANGRRPLALVRTHSKKGLMRYEDVYMPEVYKAINIAQNTAWKINKWVLAVANVITKWKHCPVRDIPAIEREELPMKPEDIDMNPEALTAWKRAKAAVYRRDKARKSRRILLEFMLEQANKFANHKAIWFPYNMDWRGRVYAVSMFNPQGNDMTKGLLTLAKGKPIGKEGYYWLKIHGANCAGVDKVPFPERIKFIEENHENIMACAKSPLENTWWAEQDLPFCFLAFCFEYAGVQHHGLSYNCSLPLAFDGSCSGIQHFSAMLRDEVGGRAVNLLPSETVQDIYGIVAKKVNEILQADAINGTDNEVVTVTDENTGEISEKVKLGTKALAGQWLAYGVTRSVTKRSVMTLAYGSKEFGFRQQVLEDTIQWAIDSGKGLMFTQPNQAAGYMAKLIWESVSVTVVAAVEAMNWLKSAAKLLAAEVKDKKTGEILRKRCAVHWVTPDGFPVWQEYKKPIQTRLNLMFLGQFRLQPTINTNKDSEIDAHKQESGIAPNFVHSQDGSHLRKTVVWAHEKYGIESFALIHDSFGTIPADAANLFKAVRETMVDTYESCDVLADFYDQFADQLHESQLDKMPALPAKGNLNLRDILESDFAFA

SEQ ID NO: 183 - DNA, 2670 bp, synthetic construct
  misc_feature 1..2670: note = Variant of RNA polymerase
  source 1..2670: mol_type = other DNA
atgcaccatcaccatcaccatatgaacacgattaacatcgctaagaacgacttctctgacatcgaactggctgctatcccgttcaacactctggctgaccattacggtgagcgtttagctcgcgaacagttggcccttgagcatgagtcttacgagatgggtgaagcacgtttccgcaagatgtttgagcgtcaacttaaagctggtgaggttgcggataacgctgccgccaagcctctcatcactaccctactccctaagatgattgcacgcatcaacgactggtttgaggaagtgaaagctaagcgcggcaagcgcccgacagccttccagttcctgcaagaaatcaagccggaagccgtagcgtacatcaccattaagaccactctggcttgcctaaccagtgcggaccgtacaaccgttcaggctgtagcaagcgcaatcggtcgggccattgaggacgaggctcgcttcggtcgtatccgtgaccttgaagctaagcacttcaagaaaaactatgaggaacaactcaacaagcgcgtagggcacgtctacaagaaagcatttatgcaagttgtcgaggctgacatgctctctaagggtctactcggtggcgaggcgtggtcttcgtggcataaggaagactctattcatgtaggagtacgctgcatcgagatgctcattgagtcaaccggaatggttagcttacaccgccaaaatgctggcgtagtaggtcaagactctgagactatcgaactcgcacctgaatacgctgaggctatcgcaacccgtgcaggtgcgctggctggcatctctccgatgttccaaccttgcgtagttcctcctaagccgtggactggcattactggtggtggctattgggctaacggtcgtcgtcctctggcgctggtgcgtactcacagtaagaaaggtctgatgcgctacgaagacgtttacatgcctgaggtgtacaaagcgattaacattgcgcaaaacaccgcctggtcgatcaacaagtgggtcctggcggtcgccaacgtaatcaccaagtggaagcattgtccggtccgggacatccctgcgattgagcgtgaagaactcccgatgaaaccggaagacatcgacatgaatcctgaggctctcaccgcgtggaaacgtgctaaagctgctgtgtaccgcagagacaaggctcgcaagtctcgccgtatcttgcttgagttcatgcttgagcaagccaataagtttgctaaccataaggccatctggttcccttacaacatggactggcgcggtcgtgtttacgctgtgtcaatgttcaacccgcaaggtaacgatatgaccaaaggactgcttacgctggcgaaaggtaaaccaatcggtaaggaaggttactactggctgaaaatccacggtgcaaactgtgcgggtgtcgataaggttccgttccctgagcgcatcaagttcattgaggaaaaccacgagaacatcatggcttgcgctaagtctccactggagaacacttggtgggctgagcaagatagtccgttctgcttccttgcgttctgctttgagtacgctggggtacagcaccacggcctgagctataactgctcccttccgctggcgtttgacgggtcttgctctggcatccagcacttctccgcgatgctccgagatgaggtaggtggtcgcgcggttaacttgcttcctagtgaaaccgttcaggacatctacgggattgttgctaagaaagtcaacgagattctacaagcagacgcaatcaatgggaccgataacgaagtagttaccgtgaccgatgagaacactggtgaaatctctgagaaagtcaagctgggcactaaggcactggctggtcaatggctggcttacggtgttactcgcagtgtgactaagcgttcagtcatgacgctggcttacgggtccaaagagttcggcttccgtcaacaagtgctgcgcgacactattcagtgggctattgattccggcaagggtctgatgttcactcagccgaatcaggctgctggatacatggctaagctgatttgggaatctgtgagcgtgacggtggtagctgcggttgaagcaatgaactggcttaagtctgctgctaagctgctggctgctgaggtcaaagataagaagactggagagattcttcgcaagcgttgcgctgtgcattgggtaactcctgatggtttccctgtgtggcaggaatacaagaagcctattcagacgcgcttgaacctgatgttcctcggtcagttccgcttacagcctaccattaacaccaacaaagatagcgagattgatgcacacaaacaggagtctggtatcgctcctaactttgtacacagccaagacggtagccaccttcgtaagactgtagtgtgggcacacgagaagtacggtatcgaatcttttgcactgattcacgactccttcggtaccattccggctgacgctgcgaacctgttcaaagcagtgcgcgaaactatggttgacacatatgagtcttgtgatgtactggctgatttctacgaccagttcgctgaccagttgcacgagtctcaattggacaaaatgccagcacttccggctaaaggtaacttgaacctccgtgacatcttagagtcggacttcgcgttcgcg

SEQ ID NO: 184 - protein, 890 aa, synthetic construct
  REGION 1..890: note = Variant of RNA polymerase
MHHHHHHMNTINIAKNDFSDIELAAIPFNTLADHYGERLAREQLALEHESYEMGEARFRKMFERQLKAGEVADNAAAKPLITTLLPKMIARINDWFEEVKAKRGKRPTAFQFLQEIKPEAVAYITIKTTLACLTSADRTTVQAVASAIGRAIEDEARFGRIRDLEAKHFKKNYEEQLNKRVGHVYKKAFMQVVEADMLSKGLLGGEAWSSWHKEDSIHVGVRCIEMLIESTGMVSLHRQNAGVVGQDSETIELAPEYAEAIATRAGALAGISPMFQPCVVPPKPWTGITGGGYWANGRRPLALVRTHSKKGLMRYEDVYMPEVYKAINIAQNTAWSINKWVLAVANVITKWKHCPVRDIPAIEREELPMKPEDIDMNPEALTAWKRAKAAVYRRDKARKSRRILLEFMLEQANKFANHKAIWFPYNMDWRGRVYAVSMFNPQGNDMTKGLLTLAKGKPIGKEGYYWLKIHGANCAGVDKVPFPERIKFIEENHENIMACAKSPLENTWWAEQDSPFCFLAFCFEYAGVQHHGLSYNCSLPLAFDGSCSGIQHFSAMLRDEVGGRAVNLLPSETVQDIYGIVAKKVNEILQADAINGTDNEVVTVTDENTGEISEKVKLGTKALAGQWLAYGVTRSVTKRSVMTLAYGSKEFGFRQQVLRDTIQWAIDSGKGLMFTQPNQAAGYMAKLIWESVSVTVVAAVEAMNWLKSAAKLLAAEVKDKKTGEILRKRCAVHWVTPDGFPVWQEYKKPIQTRLNLMFLGQFRLQPTINTNKDSEIDAHKQESGIAPNFVHSQDGSHLRKTVVWAHEKYGIESFALIHDSFGTIPADAANLFKAVRETMVDTYESCDVLADFYDQFADQLHESQLDKMPALPAKGNLNLRDILESDFAFA

SEQ ID NO: 185 - DNA, 2670 bp, synthetic construct
  misc_feature 1..2670: note = Variant of RNA polymerase
  source 1..2670: mol_type = other DNA
atgcaccatcaccatcaccatatgaacacgattaacatcgctaagaacgacttctctgacatcgaactggctgctatcccgttcaacactctggctgaccattacggtgagcgtttagctcgcgaacagttggcccttgagcatgagtcttacgagatgggtgaagcaggtttccgcaagatgtttgagcgtcaacttaaagctggtgaggttgcggataacgctgccgccaagcctctcatcactaccctactccctaagatgattgcacgcatcaacgactggtttgaggaagtgaaagctaagcgcggcaagcgcccgacagccttccagttcctgcaagaaatcaagccggaagccgtagcgtacatcaccattaagaccactctggcttgcctaaccagtgcggaccgtacaaccgttcaggctgtagcaagcgcaatcggtcgggccattgaggacgaggctcgcttcggtcgtatccgtgaccttgaagctaagcacttcaaaaaaaacgttgaggaacaactcaacaagcgcgtagggcacgtctacaagaaagcatttatgcaagttgtcgaggctgacatgctctctaagggtctactcggtggcgaggcgtggtcttcgtggcataaggaagactctattcatgtaggagtacgctgcatcgagatgctcattgagtcaaccggaatggttagcttacaccgccaaaatgctggcgtagtaggtcaagactctgagactatcgaactcgcacctgaatacgctgaggctatcgcaacccgtgcaggtgcgctggctggcatctctccgatgttccaaccttgcgtagttcctcctaagccgtggactggcattactggtggtggctattgggctaacggtcgtcgtcctctggcgctggtgcgtactcacagtaagaaaggtctgatgcgctacgaagacgtttacatgcctgaggtgtacaaagcgattaacattgcgcaaaacaccgcctggtcgatcaacaagtgggtcctggcggtcgccaacgtaatcaccaagtggaagcattgtccggtccgggacatccctgcgattgagcgtgaagaactcccgatgaaaccggaagacatcgacatgaatcctgaggctctcaccgcgtggaaacgtgctaaagctgctgtgtaccgcagagacaaggctcgcaagtctcgccgtatcttgcttgagttcatgcttgagcaagccaataagtttgctaaccataaggccatctggttcccttacaacatggactggcgcggtcgtgtttacgctgtgtcaatgttcaacccgcaaggtaacgatatgaccaaaggactgcttacgctggcgaaaggtaaaccaatcggtaaggaaggttactactggctgaaaatccacggtgcaaactgtgcgggtgtcgataaggttccgttccctgagcgcatcaagttcattgaggaaaaccacgagaacatcatggcttgcgctaagtctccactggagaacacttggtgggctgagcaagatagtccgttctgcttccttgcgttctgctttgagtacgctggggtacagcaccacggcctgagctataactgctcccttccgctggcgtttgacgggtcttgctctggcatccagcacttctccgcgatgctccgagatgaggtaggtggtcgcgcggttaacttgcttcctagtgaaaccgttcaggacatctacgggattgttgctaagaaagtcaacgagattctacaagcagacgcaatcaatgggaccgataacgaagtagttaccgtgaccgatgagaacactggtgaaatctctgagaaagtcaagctgggcactaaggcactggctggtcaatggctggcttacggtgttactcgcagtgtgactaagcgttcagtcatgacgctggcttacgggtccaaagagttcggcttccgtcaacaagtgctggaagatactattcagtgggctattgattccggcaagggtctgatgttcactcagccgaatcaggctgctggatacatggctaagctgatttgggaatctgtgagcgtgacggtggtagctgcggttgaagcaatgaactggcttaagtctgctgctaagctgctggctgctgaggtcaaagataagaagactggagagattcttcgcaagcgttgcgctgtgcattgggtaactcctgatggtttccctgtgtggcaggaatacaagaagcctattcagacgcgcttgaacctgatgttcctcggtcagttccgcttacagcctaccattaacaccaacaaagatagcgagattgatgcacacaaacaggagtctggtatcgctcctaactttgtacacagccaagacggtagccaccttcgtaagactgtagtgtgggcacacgagaagtacggtatcgaatcttttgcactgattcacgactccttcggtaccattccggctgacgctgcgaacctgttcaaagcagtgcgcgaaactatggttgacacatatgagtcttgtgatgtactggctgatttctacgaccagttcgctgaccagttgcacgagtctcaattggacaaaatgccagcacttccggctaaaggtaacttgaacctccgtgacatcttagagtcggacttcgcgttcgcg

SEQ ID NO: 186 - protein, 890 aa, synthetic construct
  REGION 1..890: note = Variant of RNA polymerase
MHHHHHHMNTINIAKNDFSDIELAAIPFNTLADHYGERLAREQLALEHESYEMGEAGFRKMFERQLKAGEVADNAAAKPLITTLLPKMIARINDWFEEVKAKRGKRPTAFQFLQEIKPEAVAYITIKTTLACLTSADRTTVQAVASAIGRAIEDEARFGRIRDLEAKHFKKNVEEQLNKRVGHVYKKAFMQVVEADMLSKGLLGGEAWSSWHKEDSIHVGVRCIEMLIESTGMVSLHRQNAGVVGQDSETIELAPEYAEAIATRAGALAGISPMFQPCVVPPKPWTGITGGGYWANGRRPLALVRTHSKKGLMRYEDVYMPEVYKAINIAQNTAWSINKWVLAVANVITKWKHCPVRDIPAIEREELPMKPEDIDMNPEALTAWKRAKAAVYRRDKARKSRRILLEFMLEQANKFANHKAIWFPYNMDWRGRVYAVSMFNPQGNDMTKGLLTLAKGKPIGKEGYYWLKIHGANCAGVDKVPFPERIKFIEENHENIMACAKSPLENTWWAEQDSPFCFLAFCFEYAGVQHHGLSYNCSLPLAFDGSCSGIQHFSAMLRDEVGGRAVNLLPSETVQDIYGIVAKKVNEILQADAINGTDNEVVTVTDENTGEISEKVKLGTKALAGQWLAYGVTRSVTKRSVMTLAYGSKEFGFRQQVLEDTIQWAIDSGKGLMFTQPNQAAGYMAKLIWESVSVTVVAAVEAMNWLKSAAKLLAAEVKDKKTGEILRKRCAVHWVTPDGFPVWQEYKKPIQTRLNLMFLGQFRLQPTINTNKDSEIDAHKQESGIAPNFVHSQDGSHLRKTVVWAHEKYGIESFALIHDSFGTIPADAANLFKAVRETMVDTYESCDVLADFYDQFADQLHESQLDKMPALPAKGNLNLRDILESDFAFA

SEQ ID NO: 187 - DNA, 2670 bp, synthetic construct
  misc_feature 1..2670: note = Variant of RNA polymerase
  source 1..2670: mol_type = other DNA
atgcaccatcaccatcaccatatgaacacgattaacatcgctaagaacgacttctctgacatcgaactggctgctatcccgttcaacactctggctgaccattacggtgagcgtttagctcgcgaacagttggcccttgagcatgagtcttacgagatgggtgaagcacgtttccgcaagatgtttgagcgtcaacttaaagctggtgaggttgcggataacgctgccgccaagcctctcatcactaccctactccctaagatgattgcacgcatcaacgactggtttgaggaagtgaaagctaagcgcggcaagcgcccgacagccttccagttcctgcaagaaatcaagccggaagccgtagcgtacatcaccattaagaccactctggcttgcctaaccagtgcggaccgtacaaccgttcaggctgtagcaagcgcaatcggtcgggccattgaggacgaggctcgcttcggtcgtatccgtgaccttgaagctaagcacttcaagaaaaactatgaggaacaactcaacaagcgcgtagggcacgtctacaagaaagcatttatgcaagttgtcgaggctgacatgctctctaagggtctactcggtggcgaggcgtggtcttcgtggcataaggaagactctattcatgtaggagtacgctgcatcgagatgctcattgagtcaaccggaatggttagcttacaccgccaaaatgctggcgtagtaggtcaagactctgagactatcgaactcgcacctgaatacgctgaggctatcgcaacccgtgcaggtgcgctggctggcatctctccgatgttccaaccttgcgtagttcctcctaagccgtggactggcattactggtggtggctattgggctaacggtcgtcgtcctctggcgctggtgcgtactcacagtaagaaaggtctgatgcgctacgaagacgtttacatgcctgaggtgtacaaagcgattaacattgcgcaaaacaccgcctggtcgatcaacaagtgggtcctggcggtcgccaacgtaatcaccaagtggaagcattgtccggtccgggacatccctgcgattgagcgtgaagaactcccgatgaaaccggaagacatcgacatgaatcctgaggctctcaccgcgtggaaacgtgctaaagctgctgtgtaccgcagagacaaggctcgcaagtctcgccgtatcttgcttgagttcatgcttgagcaagccaataagtttgctaaccataaggccatctggttcccttacaacatggactggcgcggtcgtgtttacgctgtgtcaatgttcaacccgcaaggtaacgatatgaccaaaggactgcttacgctggcgaaaggtaaaccaatcggtaaggaaggttactactggctgaaaatccacggtgcaaactgtgcgggtgtcgataaggttccgttccctgagcgcatcaagttcattgaggaaaaccacgagaacatcatggcttgcgctaagtctccactggagaacacttggtgggctgagcaagatctgccgttctgcttccttgcgttctgctttgagtacgctggggtacagcaccacggcctgagctataactgctcccttccgctggcgtttgacgggtcttgctctggcatccagcacttctccgcgatgctccgagatgaggtaggtggtcgcgcggttaacttgcttcctagtgaaaccgttcaggacatctacgggattgttgctaagaaagtcaacgagattctacaagcagacgcaatcaatgggaccgataacgaagtagttaccgtgaccgatgagaacactggtgaaatctctgagaaagtcaagctgggcactaaggcactggctggtcaatggctggcttacggtgttactcgcagtgtgactaagcgttcagtcatgacgctggcttacgggtccaaagagttcggcttccgtcaacaagtgctggaagatactattcagtgggctattgattccggcaagggtctgatgttcactcagccgaatcaggctgctggatacatggctaagctgatttgggaatctgtgagcgtgacggtggtagctgcggttgaagcaatgaactggcttaagtctgctgctaagctgctggctgctgaggtcaaagataagaagactggagagattcttcgcaagcgttgcgctgtgcattgggtaactcctgatggtttccctgtgtggcaggaatacaagaagcctattcagacgcgcttgaacctgatgttcctcggtcagttccgcttacagcctaccattaacaccaacaaagatagcgagattgatgcacacaaacaggagtctggtatcgctcctaactttgtacacagccaagacggtagccaccttcgtaagactgtagtgtgggcacacgagaagtacaagatcgaatcttttgcactgattcacgactccttcggtaccattccggctgacgctgcgaacctgttcaaagcagtgcgcgaaactatggttgacacatatgagtcttgtgatgtactggctgatttctacgaccagttcgctgaccagttgcacgagtctcaattggacaaaatgccagcacttccggctaaaggtaacttgaacctccgtgacatcttagagtcggacttcgcgttcgcg

SEQ ID NO: 188 - protein, 890 aa, synthetic construct
  REGION 1..890: note = Variant of RNA polymerase
MHHHHHHMNTINIAKNDFSDIELAAIPFNTLADHYGERLAREQLALEHESYEMGEARFRKMFERQLKAGEVADNAAAKPLITTLLPKMIARINDWFEEVKAKRGKRPTAFQFLQEIKPEAVAYITIKTTLACLTSADRTTVQAVASAIGRAIEDEARFGRIRDLEAKHFKKNYEEQLNKRVGHVYKKAFMQVVEADMLSKGLLGGEAWSSWHKEDSIHVGVRCIEMLIESTGMVSLHRQNAGVVGQDSETIELAPEYAEAIATRAGALAGISPMFQPCVVPPKPWTGITGGGYWANGRRPLALVRTHSKKGLMRYEDVYMPEVYKAINIAQNTAWSINKWVLAVANVITKWKHCPVRDIPAIEREELPMKPEDIDMNPEALTAWKRAKAAVYRRDKARKSRRILLEFMLEQANKFANHKAIWFPYNMDWRGRVYAVSMFNPQGNDMTKGLLTLAKGKPIGKEGYYWLKIHGANCAGVDKVPFPERIKFIEENHENIMACAKSPLENTWWAEQDLPFCFLAFCFEYAGVQHHGLSYNCSLPLAFDGSCSGIQHFSAMLRDEVGGRAVNLLPSETVQDIYGIVAKKVNEILQADAINGTDNEVVTVTDENTGEISEKVKLGTKALAGQWLAYGVTRSVTKRSVMTLAYGSKEFGFRQQVLEDTIQWAIDSGKGLMFTQPNQAAGYMAKLIWESVSVTVVAAVEAMNWLKSAAKLLAAEVKDKKTGEILRKRCAVHWVTPDGFPVWQEYKKPIQTRLNLMFLGQFRLQPTINTNKDSEIDAHKQESGIAPNFVHSQDGSHLRKTVVWAHEKYKIESFALIHDSFGTIPADAANLFKAVRETMVDTYESCDVLADFYDQFADQLHESQLDKMPALPAKGNLNLRDILESDFAFA

SEQ ID NO: 189 - DNA, 2670 bp, synthetic construct
  misc_feature 1..2670: note = Variant of RNA polymerase
  source 1..2670: mol_type = other DNA
atgcaccatcaccatcaccatatgaacacgattaacatcgctaagaacgacttctctgacatcgaactggctgctatcccgttcaacactctggctgaccattacggtgagggcttagctcgcgaacagttggcccttgagcatgagtcttacgagatgggtgaagcacgcttccgcaagatgtttgagcgtcaacttaaagctggtgaggttgcggataacgctgccgccaagcctctcatcactaccctactccctaagatgattgcacgcatcaacgactggtttgaggaagtgaaagctaagcgcggcaagcgcccgacagccttccagttcctgcaagaaatcaagccggaagccgtagcgtacatcaccattaagaccactctggcttgcctaaccagtgcggaccgtacaaccgttcaggcagtagcaagcgcaatcggtcgggccattgaggacgaggctcgcttcggtcgtatccgtgaccttgaagctaagcacttcaagaaaaacgttgaggaacaactcaacaagcgcgtagggcacgtctacaagaaagcatttatgcaagttgtcgaggctgacatgctctctaagggtctactcggtggcgaggcgtggtcttcgtggcataaggaagactctattcatgtaggagtacgctgcatcgagatgctcattgagtcaaccggaatggttagcttacaccgccaaaatgctggcgtagtaggtcaagactctgagactatcgaactcgcacctgaatacgctgaggctatcgcaacccgtgcaggtgcgctggctggcatctctccgatgttccaaccttgcgtagttcctcctaagccgtggactggcattactggtggtggctattgggctaacggtcgtcgtcctctggcgctggtgcgtactcacagtaagaaaggtctgatgcgctacgaagacgtttacatgcctgaggtgtacaaagcgattaacattgcgcaaaacaccgcctggaagatcaacaagtgggtcctggcggtcgccaacgtaatcaccaagtggaagcattgtccggtccgggacatccctgcgattgagcgtgaagaactcccgatgaaaccggaagacatcgacatgaatcctgaggctctcaccgcgtggaaacgtgctaaagctgctgtgtaccgcagagacaaggctcgcaagtctcgccgtatcttgcttgagttcatgcttgagcaagccaataagtttgctaaccataaggccatctggttcccttacaacatggactggcgcggtcgtgtttacgctgtgtcaatgttcaatccgcaaggtaacgatatgaccaaaggactgcttacgctggcgaaaggtaaaccaatcggtaaggaaggttactactggctgaaaatccacggtgcaaactgtgcgggtgtcgataaggttccgttccctgagcgcatcaagttcattgaggaaaaccacgagaacatcatggcttgcgctaagtctccactggagaacacttggtgggctgagcaagatagtccgttctgcttccttgcgttctgctttgagtacgctggggtacagcaccacggcctgagctataactgctcccttccgctggcgtttgacgggtcttgctctggcatccagcacttctccgcgatgctccgagatgaggtaggtggtcgcgcggttaacttgcttcctagtgaaaccgttcaggacatctacgggattgttgctaagaaagtcaacgagattctacaagcagacgcaatcaatgggaccgataacgaagtagttaccgtgaccgatgagaacactggtgaaatctctgagaaagtcaagctgggcactaaggcactggctggtcaatggctggcttacggtgttactcgcagtgtgactaagcgttcggtcatgacgctggcttacgggtccaaagaattcggcttccgtcaacaagtgctggaagatactattcagtgggctattgattccggcaagggtctgatgttcactcagccgaatcaggctgctggatacatggctaagctgatttgggaatctgtgagcgtgacggtggtagctgcggttgaagcaatgaactggcttaagtctgctgctaagctgctggctgctgaggtcaaagataagaagactggagagattcttcgcaagcgttgcgctgtgcattgggtaactcctgatggtttccctgtgtggcaggaatacaagaagcctattcagacgcgcttgaacctgatgttcctcggtcagttccgcttacagcctaccattaacaccaacaaagatagcgagattgatgcacacaaacaggaatctggtatcgctcctaactttgtacacagccaagacggtagccaccttcgtaagactgtagtgtgggcacacgagaagtacggaatcgaatcttttgcactgattcacgactccttcggtaccattccggctgacgctgcgaacctgttcaaagcagtgcgcgaaactatggttgacacatatgagtcttgtgatgtactggctgatttctacgaccagttcgctgaccagttgcacgagtctcaattggacaaaatgccagcacttccggctaaaggtaacttgaacctccgtgacatcttagagtcggacttcgcgttcgcg

SEQ ID NO: 190 - protein, 890 aa, synthetic construct
  REGION 1..890: note = Variant of RNA polymerase
MHHHHHHMNTINIAKNDFSDIELAAIPFNTLADHYGEGLAREQLALEHESYEMGEARFRKMFERQLKAGEVADNAAAKPLITTLLPKMIARINDWFEEVKAKRGKRPTAFQFLQEIKPEAVAYITIKTTLACLTSADRTTVQAVASAIGRAIEDEARFGRIRDLEAKHFKKNVEEQLNKRVGHVYKKAFMQVVEADMLSKGLLGGEAWSSWHKEDSIHVGVRCIEMLIESTGMVSLHRQNAGVVGQDSETIELAPEYAEAIATRAGALAGISPMFQPCVVPPKPWTGITGGGYWANGRRPLALVRTHSKKGLMRYEDVYMPEVYKAINIAQNTAWKINKWVLAVANVITKWKHCPVRDIPAIEREELPMKPEDIDMNPEALTAWKRAKAAVYRRDKARKSRRILLEFMLEQANKFANHKAIWFPYNMDWRGRVYAVSMFNPQGNDMTKGLLTLAKGKPIGKEGYYWLKIHGANCAGVDKVPFPERIKFIEENHENIMACAKSPLENTWWAEQDSPFCFLAFCFEYAGVQHHGLSYNCSLPLAFDGSCSGIQHFSAMLRDEVGGRAVNLLPSETVQDIYGIVAKKVNEILQADAINGTDNEVVTVTDENTGEISEKVKLGTKALAGQWLAYGVTRSVTKRSVMTLAYGSKEFGFRQQVLEDTIQWAIDSGKGLMFTQPNQAAGYMAKLIWESVSVTVVAAVEAMNWLKSAAKLLAAEVKDKKTGEILRKRCAVHWVTPDGFPVWQEYKKPIQTRLNLMFLGQFRLQPTINTNKDSEIDAHKQESGIAPNFVHSQDGSHLRKTVVWAHEKYGIESFALIHDSFGTIPADAANLFKAVRETMVDTYESCDVLADFYDQFADQLHESQLDKMPALPAKGNLNLRDILESDFAFA

SEQ ID NO: 191 - DNA, 2670 bp, synthetic construct
  misc_feature 1..2670: note = Variant of RNA polymerase
  source 1..2670: mol_type = other DNA
atgcaccatcaccatcaccatatgaacacgattaacatcgctaagaacgacttctctgacatcgaactggctgctatcccgttcaacactctggctgaccattacggtgagggcttagctcgcgaacagttggcccttgagcatgagtcttacgagatgggtgaagcacgcttccgcaagatgtttgagcgtcaacttaaagctggtgaggttgcggataacgctgccgccaagcctctcatcactaccctactccctaagatgattgcacgcatcaacgactggtttgaggaagtgaaagctaagcgcggcaagcgcccgacagccttccagttcctgcaagaaatcaagccggaagccgtagcgtacatcaccattaagaccactctggcttgcctaaccagtgcggaccgtacaaccgttcaggtagtagcaagcgcaatcggtcgggccattgaggacgaggctcgcttcggtcgtatccgtgaccttgaagctaagcacttcaagaaaaacgttgaggaacaactcaacaagcgcgtagggcacgtctacaagaaagcatttatgcaagttgtcgaggctgacatgctctctaagggtctactcggtggcgaggcgtggtcttcgtggcataaggaagactctattcatgtaggagtacgctgcatcgagatgctcattgagtcaaccggaatggttagcttacaccgccaaaatgctggcgtagtaggtcaagactctgagactatcgaactcgcacctgaatacgctgaggctatcgcaacccgtgcaggtgcgctggctggcatctctccgatgttccaaccttgcgtagttcctcctaagccgtggactggcattactggtggtggctattgggctaacggtcgtcgtcctctggcgctggtgcgtactcacagtaagaaaggtctgatgcgctacgaagacgtttacatgcctgaggtgtacaaagcgattaacattgcgcaaaacaccgcctggaagatcaacaagaaagtcctggcggtcgccaacgtaatcaccaagtggaagcattgtccggtccgggacatccctgcgattgagcgtgaagaactcccgatgaaaccggaagacatcgacatgaatcctgaggctctcaccgcgtggaaacgtgctaaagctgctgtgtaccgcagagacaaggctcgcaagtctcgccgtatcttgcttgagttcatgcttgagcaagccaataagtttgctaaccataaggccatctggttcccttacaacatggactggcgcggtcgtgtttacgctgtgtcaatgttcaatccgcaaggtaacgatatgaccaaaggactgcttacgctggcgaaaggtaaaccaatcggtaaggaaggttactactggctgaaaatccacggtgcaaactgtgcgggtgtcgataaggttccgttccctgagcgcatcaagttcattgaggaaaaccacgagaacatcatggcttgcgctaagtctccactggagaacacttggtgggctgagcaagatagtccgttctgcttccttgcgttctgctttgagtacgctggggtacagcaccacggcctgagctataactgctcccttccgctggcgtttgacgggtcttgctctggcatccagcacttctccgcgatgctccgagatgaggtaggtggtcgcgcggttaacttgcttcctagtgaaaccgttcaggacatctacgggattgttgctaagaaagtcaacgagattctacaagcagacgcaatcaatgggaccgataacgaagtagttaccgtgaccgatgagaacactggtgaaatctctgagaaagtcaagctgggcactaaggcactggctggtcaatggctggcttacggtgttactcgcagtgtgactaagcgttcggtcatgacgctggcttacgggtccaaagaattcggcttccgtcaacaagtgctggaagatactattcagtgggctattgattccggcaagggtctgatgttcactcagccgaatcaggctgctggatacatggctaagctgatttgggaatctgtgagcgtgacggtggtagctgcggttgaagcaatgaactggcttaagtctgctgctaagctgctggctgctgaggtcaaagataagaagactggagagattcttcgcaagcgttgcgctgtgcattgggtaactcctgatggtttccctgtgtggcaggaatacaagaagcctattcagacgcgcttgaacctgatgttcctcggtcagttccgcttacagcctaccattaacaccaacaaagatagcgagattgatgcacacaaacaggtatctggtatcgctcctaactttgtacacagccaagacggtagccaccttcgtaagactgtagtgtgggcacacgagaagtacggaatcgaatcttttgcactgattcacgactccttcggtaccattccggctgacgctgcgaacctgttcaaagcagtgcgcgaaactatggttgacacatatgagtcttgtgatgtactggctgatttctacgaccagttcgctgaccagttgcacgagtctcaattggacaaaatgccagcacttccggctaaaggtaacttgaacctccgtgacatcttagagtcggacttcgcgttcgcg

SEQ ID NO: 192 - protein, 890 aa, synthetic construct
  REGION 1..890: note = Variant of RNA polymerase
MHHHHHHMNTINIAKNDFSDIELAAIPFNTLADHYGEGLAREQLALEHESYEMGEARFRKMFERQLKAGEVADNAAAKPLITTLLPKMIARINDWFEEVKAKRGKRPTAFQFLQEIKPEAVAYITIKTTLACLTSADRTTVQVVASAIGRAIEDEARFGRIRDLEAKHFKKNVEEQLNKRVGHVYKKAFMQVVEADMLSKGLLGGEAWSSWHKEDSIHVGVRCIEMLIESTGMVSLHRQNAGVVGQDSETIELAPEYAEAIATRAGALAGISPMFQPCVVPPKPWTGITGGGYWANGRRPLALVRTHSKKGLMRYEDVYMPEVYKAINIAQNTAWKINKKVLAVANVITKWKHCPVRDIPAIEREELPMKPEDIDMNPEALTAWKRAKAAVYRRDKARKSRRILLEFMLEQANKFANHKAIWFPYNMDWRGRVYAVSMFNPQGNDMTKGLLTLAKGKPIGKEGYYWLKIHGANCAGVDKVPFPERIKFIEENHENIMACAKSPLENTWWAEQDSPFCFLAFCFEYAGVQHHGLSYNCSLPLAFDGSCSGIQHFSAMLRDEVGGRAVNLLPSETVQDIYGIVAKKVNEILQADAINGTDNEVVTVTDENTGEISEKVKLGTKALAGQWLAYGVTRSVTKRSVMTLAYGSKEFGFRQQVLEDTIQWAIDSGKGLMFTQPNQAAGYMAKLIWESVSVTVVAAVEAMNWLKSAAKLLAAEVKDKKTGEILRKRCAVHWVTPDGFPVWQEYKKPIQTRLNLMFLGQFRLQPTINTNKDSEIDAHKQVSGIAPNFVHSQDGSHLRKTVVWAHEKYGIESFALIHDSFGTIPADAANLFKAVRETMVDTYESCDVLADFYDQFADQLHESQLDKMPALPAKGNLNLRDILESDFAFA

SEQ ID NO: 193 - DNA, 2670 bp, synthetic construct
  misc_feature 1..2670: note = Variant of RNA polymerase
  source 1..2670: mol_type = other DNA
atgcaccatcaccatcaccatatgaacacgattaacatcgctaagaacgacttctctgacatcgaactggctgctatcccgttcaacactctggctgaccattacggtgagggcttagctcgcgaacagttggcccttgagcatgagtcttacgagatgggtgaagcacgcttccgcaagatgtttgagcgtcaacttaaagctggtgaggttgcggataacgctgccgccaagcctctcatcactaccctactccctaagatgattgcacgcatcaacgactggtttgaggaagtgaaagctaagcgcggcaagcgcccgacagccttccagttcctgcaagaaatcaagccggaagccgtagcgtacatcaccattaagaccactctggcttgcctaaccagtgcggaccgtacaaccgttcaggtagtagcaagcgcaatcggtcgggccattgaggacgaggctcgcttcggtcgtatccgtgaccttgaagctaagcacttcaagaaaaacgttgaggaacaactcaacaagcgcgtagggcacgtctacaagaaagcatttatgcaagttgtcgaggctgacatgctctctaagggtctactcggtggcgaggcgtggtcttcgtggcataaggaagactctattcatgtaggagtacgctgcatcgagatgctcattgagtcaaccggaatggttagcttacaccgccaaaatgctggcgtagtaggtcaagactctgagactatcgaactcgcacctgaatacgctgaggctatcgcaacccgtgcaggtgcgctggctggcatctctccgatgttccaaccttgcgtagttcctcctaagccgtggactggcattactggtggtggctattgggctaacggtcgtcgtcctctggcgctggtgcgtactcacagtaagaaaggtctgatgcgctacgaagacgtttacatgcctgaggtgtacaaagcgattaacattgcgcaaaacaccgcctggaagatcaacaagaaagtcctggcggtcgccaacgtaatcaccaagtggaagcattgtccggtcgaggacatccctgcgattgagcgtgaagaactcccgatgaaaccggaagacatcgacatgaatcctgaggctctcaccgcgtggaaacgtgctaaagctgctgtgtaccgcagagacaaggctcgcaagtctcgccgtatcttgcttgagttcatgcttgagcaagccaataagtttgctaaccataaggccatctggttcccttacaacatggactggcgcggtcgtgtttacgctgtgtcaatgttcaacccgcaaggtaacgatatgaccaaaggactgcttacgctggcgaaaggtaaaccaatcggtaaggaaggttactactggctgaaaatccacggtgcaaactgtgcgggtgtcgataaggttccgttccctgagcgcatcaagttcattgaggaaaaccacgagaacatcatggcttgcgctaagtctccactggagaacacttggtgggctgagcaagatctgccgttctgcttccttgcgttctgctttgagtacgctggggtacagcaccacggcctgagctataactgctcccttccgctggcgtttgacgggtcttgctctggcatccagcacttctccgcgatgctccgagatgaggtaggtggtcgcgcggttaacttgcttcctagtgaaaccgttcaggacatctacgggattgttgctaagaaagtcaacgagattctacaagcagacgcaatcaatgggaccgataacgaagtagttaccgtgaccgatgagaacactggtgaaatctctgagaaagtcaagctgggcactaaggcactggctggtcaatggctggcttacggtgttactcgcagtgtgactaagcgttcggtcatgacgctggcttacgggtccaaagaattcggcttccgtcaacaagtgctggaagataccattcagtgggctattgattccggcaagggtctgatgttcactcagccgaatcaggctgctggatacatggctaagctgatttgggaatctgtgagcgtgacggtggtagctgcggttgaagcaatgaactggcttaagtctgctgctaagctgctggctgctgaggtcaaagataagaagactggagagattcttcgcaagcgttgcgctgtgcattgggtaactcctgatggtttccctgtgtggcaggaatacaagaagcctattcagacgcgcttgaacctgatgttcctcggtcagttccgcttacagcctaccattaacaccaacaaagatagcgagattgatgcacacaaacaggaatctggtatcgctcctaactttgtacacagccaagacggtagccaccttcgtaagactgtagtgtgggcacacgagaagtacggaatcgaatcttttgcactgattcacgactccttcggtaccattccggctgacgctgcgaacctgttcaaagcagtgcgcgaaactatggttgacacatatgagtcttgtgatgtactggctgatttctacgaccagttcgctgaccagttgcacgagtctcaattggacaaaatgccagcacttccggctaaaggtaacttgaacctccgtgacatcttagagtcggacttcgcgttcgcg

SEQ ID NO: 194 - protein, 890 aa, synthetic construct
  REGION 1..890: note = Variant of RNA polymerase
MHHHHHHMNTINIAKNDFSDIELAAIPFNTLADHYGEGLAREQLALEHESYEMGEARFRKMFERQLKAGEVADNAAAKPLITTLLPKMIARINDWFEEVKAKRGKRPTAFQFLQEIKPEAVAYITIKTTLACLTSADRTTVQVVASAIGRAIEDEARFGRIRDLEAKHFKKNVEEQLNKRVGHVYKKAFMQVVEADMLSKGLLGGEAWSSWHKEDSIHVGVRCIEMLIESTGMVSLHRQNAGVVGQDSETIELAPEYAEAIATRAGALAGISPMFQPCVVPPKPWTGITGGGYWANGRRPLALVRTHSKKGLMRYEDVYMPEVYKAINIAQNTAWKINKKVLAVANVITKWKHCPVEDIPAIEREELPMKPEDIDMNPEALTAWKRAKAAVYRRDKARKSRRILLEFMLEQANKFANHKAIWFPYNMDWRGRVYAVSMFNPQGNDMTKGLLTLAKGKPIGKEGYYWLKIHGANCAGVDKVPFPERIKFIEENHENIMACAKSPLENTWWAEQDLPFCFLAFCFEYAGVQHHGLSYNCSLPLAFDGSCSGIQHFSAMLRDEVGGRAVNLLPSETVQDIYGIVAKKVNEILQADAINGTDNEVVTVTDENTGEISEKVKLGTKALAGQWLAYGVTRSVTKRSVMTLAYGSKEFGFRQQVLEDTIQWAIDSGKGLMFTQPNQAAGYMAKLIWESVSVTVVAAVEAMNWLKSAAKLLAAEVKDKKTGEILRKRCAVHWVTPDGFPVWQEYKKPIQTRLNLMFLGQFRLQPTINTNKDSEIDAHKQESGIAPNFVHSQDGSHLRKTVVWAHEKYGIESFALIHDSFGTIPADAANLFKAVRETMVDTYESCDVLADFYDQFADQLHESQLDKMPALPAKGNLNLRDILESDFAFA

SEQ ID NO: 195 - DNA, 2670 bp, synthetic construct
  misc_feature 1..2670: note = Variant of RNA polymerase
  source 1..2670: mol_type = other DNA
atgcaccatcaccatcaccatatgaacacgattaacatcgctaagaacgacttctctgacatcgaactggctgctatcccgttcaacactctggctgaccattacggtgagcgtttagctcgcgaacagttggcccttgagcatgagtcttacgagatgggtgaagcacgtttccgcaagatgtttgagcgtcaacttaaagctggtgaggttgcggataacgctgccgccaagcctctcatcactaccctactccctaagatgattgcacgcatcaacgactggtttgaggaagtgaaagctaagcgcggcaagcgcccgacagccttccagttcctgcaagaaatcaagccggaagccgtagcgtacatcaccattaagaccactctggcttgcctaaccagtgcggaccgtacaaccgttcaggctgtagcaagcgcaatcggtcgggccattgaggacgaggctcgcttcggtcgtatccgtgaccttgaagctaagcacttcaagaaaaactatgaggaacaactcaacaagcgcgtagggcacgtctacaagaaagcatttatgcaagttgtcgaggctgacatgctctctaagggtctactcggtggcgagtcgtggtcttcgtggcataaggaagactctattcatgtaggagtacgctgcatcgagatgctcattgagtcaaccggaatggttagcttacaccgccaaaatgctggcgtagtaggtcaagactctgagactatcgaactcgcacctgaatacgctgaggctatcgcaacccgtgcaggtgcgctggctggcatctctccgatgttccaaccttgcgtagttcctcctaagccgtggactggcattactggtggtggctattgggctaacggtcgtcgtcctctggcgctggtgcgtactcacagtaagaaaggtctgatgcgctacgaagacgtttacatgcctgaggtgtacaaagcgattaacattgcgcaaaacaccgcctggtcgatcaacaagtgggtcctggcggtcgccaacgtaatcaccaagtggaagcattgtccggtccgggacatccctgcgattgagcgtgaagaactcccgatgaaaccggaagacatcgacatgaatcctgaggctctcaccgcgtggaaacgtgctaaagctgctgtgtaccgcagagacaaggctcgcaagtctcgccgtatcttgcttgagttcatgcttgagcaagccaataagtttgctaaccataaggccatctggttcccttacaacatggactggcgcggtcgtgtttacgctgtgtcaatgttcaacccgcaaggtaacgatatgaccaaaggactgcttacgctggcgaaaggtaaaccaatcggtaaggaaggttactactggctgaaaatccacggtgcaaactgtgcgggtgtcgataaggttccgttccctgagcgcatcaagttcattgaggaaaaccacgagaacatcatggcttgcgctaagtctccactggagaacacttggtgggctgagcaagatagtccgttctgcttccttgcgttctgctttgagtacgctggggtacagcaccacggcctgagctataactgctcccttccgctggcgtttgacgggtcttgctctggcatccagcacttctccgcgatgctccgagatgaggtaggtggtcgcgcggttaacttgcttcctagtgaaaccgttcaggacatctacgggattgttgctaagaaagtcaacgagattctacaagcagacgcaatcaatgggaccgataacgaagtagttaccgtgaccgatgagaacactggtgaaatctctgagaaagtcaagctgggcactaaggcactggctggtcaatggctggcttacggtgttactcgcagtgtgactaagcgttcagtcatgacgctggcttacgggtccaaagagttcggcttccgtcaacaagtgctgcgccacactattcagtgggctattgattccggcaaaggtctgatgttcactcagccgaatcaggctgctggatacatggctaagctgatttgggaatctgtgagcgtgacggtggtagctgcggttgaagcaatgaactggcttaagtctgctgctaagctgctggctgctgaggtcaaagataagaagactggagagattcttcgcaagcgttgcgctgtgcattgggtaactcctgatggtttccctgtgtggcaggaatacaagaagcctattcagacgcgcttgaacctgatgttcctcggtcagttccgcttacagcctaccattaacaccaacaaagatagcgagattgatgcacacaaacaggagtctggtatcgctcctaactttgtacacagccaagacggtagccaccttcgtaagactgtagtgtgggcacacgagaagtacggaatcgaatcttttgcactgattcacgactccttcggtaccattccggctgacgctgcgaacctgttcaaagcagtgcgcgaaactatggttgacacatatgagtcttgtgatgtactggctgatttctacgaccagttcgctgaccagttgcacgagtctcaattggacaaaatgccagcacttccggctaaaggtaacttgaacctccgtgacatcttagagtcggacttcgcgttcgcg

SEQ ID NO: 196 - protein, 890 aa, synthetic construct
  REGION 1..890: note = Variant of RNA polymerase
MHHHHHHMNTINIAKNDFSDIELAAIPFNTLADHYGERLAREQLALEHESYEMGEARFRKMFERQLKAGEVADNAAAKPLITTLLPKMIARINDWFEEVKAKRGKRPTAFQFLQEIKPEAVAYITIKTTLACLTSADRTTVQAVASAIGRAIEDEARFGRIRDLEAKHFKKNYEEQLNKRVGHVYKKAFMQVVEADMLSKGLLGGESWSSWHKEDSIHVGVRCIEMLIESTGMVSLHRQNAGVVGQDSETIELAPEYAEAIATRAGALAGISPMFQPCVVPPKPWTGITGGGYWANGRRPLALVRTHSKKGLMRYEDVYMPEVYKAINIAQNTAWSINKWVLAVANVITKWKHCPVRDIPAIEREELPMKPEDIDMNPEALTAWKRAKAAVYRRDKARKSRRILLEFMLEQANKFANHKAIWFPYNMDWRGRVYAVSMFNPQGNDMTKGLLTLAKGKPIGKEGYYWLKIHGANCAGVDKVPFPERIKFIEENHENIMACAKSPLENTWWAEQDSPFCFLAFCFEYAGVQHHGLSYNCSLPLAFDGSCSGIQHFSAMLRDEVGGRAVNLLPSETVQDIYGIVAKKVNEILQADAINGTDNEVVTVTDENTGEISEKVKLGTKALAGQWLAYGVTRSVTKRSVMTLAYGSKEFGFRQQVLRHTIQWAIDSGKGLMFTQPNQAAGYMAKLIWESVSVTVVAAVEAMNWLKSAAKLLAAEVKDKKTGEILRKRCAVHWVTPDGFPVWQEYKKPIQTRLNLMFLGQFRLQPTINTNKDSEIDAHKQESGIAPNFVHSQDGSHLRKTVVWAHEKYGIESFALIHDSFGTIPADAANLFKAVRETMVDTYESCDVLADFYDQFADQLHESQLDKMPALPAKGNLNLRDILESDFAFA

SEQ ID NO: 197 - DNA, 2670 bp, synthetic construct
  misc_feature 1..2670: note = Variant of RNA polymerase
  source 1..2670: mol_type = other DNA
atgcaccatcaccatcaccatatgaacacgattaacatcgctaagaacgacttctctgacatcgaactggctgctatcccgttcaacactctggctgaccattacggtgagcgtttagctcgcgaacagttggcccttgagcatgagtcttacgagatgggtgaagcacgtttccgcaagatgtttgagcgtcaacttaaagctggtgaggttgcggataacgctgccgccaagcctctcatcactaccctactccctaagatgattgcacgcatcaacgactggtttgaggaagtgaaagctaagcgcggcaagcgcccgacagccttccagttcctgcaagaaatcaagccggaagccgtagcgtacatcaccattaagaccactctggcttgcctaaccagtgcggaccgtacaaccgttcaggctgtagcaagcgcaatcggtcgggccattgaggacgaggctcgcttcggtcgtatccgtgaccttgaagctaagcacttcaagaaaaactatgaggaacaactcaacaagcgcgtagggcacgtctacaagaaagcatttatgcaagttgtcgaggctgacatgctctctaagggtctactcggtggcgaggcgtggtcttcgtggcataaggaagactctattcatgtaggagtacgctgcatcgagatgctcattgagtcaaccggaatggttagcttacaccgccaaaatgctggcgtagtaggtcaagactctgagactatcgaactcgcacctgaatacgctgaggctatcgcaacccgtgcaggtgcgctggctggcatctctccgatgttccaaccttgcgtagttcctcctaagccgtggactggcattactggtggtggctattgggctaacggtcgtcgtcctctggcgctggtgcgtactcacagtaagaaaggtctgatgcgctacgaagacgtttacatgcctgaggtgtacaaagcgattaacattgcgcaaaacaccgcctggtcgatcaacaagtgggtcctggcggtcgccaacgtaatcaccaagtggaagcattgtccggtccgggacatccctgcgattgagcgtgaagaactcccgatgaaaccggaagacatcgacatgaatcctgaggctctcactgcgtggaaacgtgctaaagctgctgtgtaccgcagagacaaggctcgcaagtctcgccgtatcttgcttgagttcatgcttgagcaagccaataagtttgctaaccatcgtgccatctggttcccttacaacatggactggcgcggtcgtgtttacgctgtgtcaatgttcaacccgcaaggtaacgatatgaccaaaggactgcttacgctggcgaaaggtaaaccaatcggtaaggaaggttactactggctgaaaatccacggtgcaaactgtgcgggtgtcgataaggttccgttccctgagcgcatcaagttcattgaggaaaaccacgagaacatcatggcttgcgctaagtctccactggagaacacttggtgggctgagcaagatagtccgttctgcttccttgcgttctgctttgagtacgctggggtacagcaccacggcctgagctataactgctcccttccgctggcgtttgacgggtcttgctctggcatccagcacttctccgcgatgctccgagatgaggtaggtggtcgcgcggttaacttgcttcctagtgaaaccgttcaggacatctacgggattgttgctaagaaagtcaacgagattctacaagcagacgcaatcaatgggaccgataacgaagtagttaccgtgaccgatgagaacactggtgaaatctctgagaaagtcaagctgggcactaaggcactggctggtcaatggctggcttacggtgttactcgcagtgtgactaagcgttcagtcatgacgctggcttacgggtccaaagagttcggcttccgtcaacaagtgctgcgccacactattcagtgggctattgattccggcaaaggtctgatgttcactcagccgaatcaggctgctggatacatggctaagctgatttgggaatctgtgagcgtgacggtggtagctgcggttgaagcaatgaactggcttaagtctgctgctaagctgctggctgctgaggtcaaagataagaagactggagagattcttcgcaagcgttgcgctgtgcattgggtaactcctgatggtttccctgtgtggcaggaatacaagaagcctattcagacgcgcttgaacctgatgttcctcggtcagttccgcttacagcctaccattaacaccaacaaagatagcgagattgatgcacacaaacaggagtctggtatcgctcctaactttgtacacagccaagacggtagccaccttcgtaagactgtagtgtgggcacacgagaagtacggaatcgaatcttttgcactgattcacgactccttcggtaccattccggctgacgctgcgaacctgttcaaagcagtgcgcgaaactatggttgacacatatgagtcttgtgatgtactggctgatttctacgaccagttcgctgaccagttgcacgagtctcaattggacaaaatgccagcacttccggctaaaggtaacttgaacctccgtgacatcttagagtcggacttcgcgttcgcg

SEQ ID NO: 198 - protein, 890 aa, synthetic construct
  REGION 1..890: note = Variant of RNA polymerase
MHHHHHHMNTINIAKNDFSDIELAAIPFNTLADHYGERLAREQLALEHESYEMGEARFRKMFERQLKAGEVADNAAAKPLITTLLPKMIARINDWFEEVKAKRGKRPTAFQFLQEIKPEAVAYITIKTTLACLTSADRTTVQAVASAIGRAIEDEARFGRIRDLEAKHFKKNYEEQLNKRVGHVYKKAFMQVVEADMLSKGLLGGEAWSSWHKEDSIHVGVRCIEMLIESTGMVSLHRQNAGVVGQDSETIELAPEYAEAIATRAGALAGISPMFQPCVVPPKPWTGITGGGYWANGRRPLALVRTHSKKGLMRYEDVYMPEVYKAINIAQNTAWSINKWVLAVANVITKWKHCPVRDIPAIEREELPMKPEDIDMNPEALTAWKRAKAAVYRRDKARKSRRILLEFMLEQANKFANHRAIWFPYNMDWRGRVYAVSMFNPQGNDMTKGLLTLAKGKPIGKEGYYWLKIHGANCAGVDKVPFPERIKFIEENHENIMACAKSPLENTWWAEQDSPFCFLAFCFEYAGVQHHGLSYNCSLPLAFDGSCSGIQHFSAMLRDEVGGRAVNLLPSETVQDIYGIVAKKVNEILQADAINGTDNEVVTVTDENTGEISEKVKLGTKALAGQWLAYGVTRSVTKRSVMTLAYGSKEFGFRQQVLRHTIQWAIDSGKGLMFTQPNQAAGYMAKLIWESVSVTVVAAVEAMNWLKSAAKLLAAEVKDKKTGEILRKRCAVHWVTPDGFPVWQEYKKPIQTRLNLMFLGQFRLQPTINTNKDSEIDAHKQESGIAPNFVHSQDGSHLRKTVVWAHEKYGIESFALIHDSFGTIPADAANLFKAVRETMVDTYESCDVLADFYDQFADQLHESQLDKMPALPAKGNLNLRDILESDFAFA

SEQ ID NO: 199 - DNA, 2670 bp, synthetic construct
  misc_feature 1..2670: note = Variant of RNA polymerase
  source 1..2670: mol_type = other DNA
atgcaccatcaccatcaccatatgaacacgattaacatcgctaagaacgacttctctgacatcgaactggctgctatcccgttcaacactctggctgaccattacggtgagcgtttagctcgcgaacagttggcccttgagcatgagtcttacgagatgggtgaagcacgtttccgcaagatgtttgagcgtcaacttaaagctggtgaggttgcggataacgctgccgccaagcctctcatcactaccctactccctaagatgattgcacgcatcaacgactggtttgaggaagtgaaagctaagcgcggcaagcgcccgacagccttccagttcctgcaagaaatcaagccggaagccgtagcgtacatcaccattaagaccactctggcttgcctaaccagtgcggaccgtacaaccgttcaggctgtagcaagcgcaatcggtcgggccattgaggacgaggctcgcttcggtcgtatccgtgaccttgaagctaagcacttcaagaaaaactatgaggaacaactcaacaagcgcgtagggcacgtctacaagaaagcatttatgcaagttgtcgaggctgacatgctctctaagggtctactcggtggcgagtcgtggtcttcgtggcataaggaagactctattcatgtaggagtacgctgcatcgagatgctcattgagtcaaccggaatggttagcttacaccgccaaaatgctggcgtagtaggtcaagactctgagactatcgaactcgcacctgaatacgctgaggctatcgcaacccgtgcaggtgcgctggctggcatctctccgatgttccaaccttgcgtagttcctcctaagccgtggactggcattactggtggtggctattgggctaacggtcgtcgtcctctggcgctggtgcgtactcacagtaagaaaggtctgatgcgctacgaagacgtttacatgcctgaggtgtacaaagcgattaacattgcgcaaaacaccgcctggaagatcaacaagaaagtcctggcggtcgccaacgtaatcaccaagtggaagcattgtccggtccgggacatccctgcgattgagcgtgaagaactcccgatgaaaccggaagacatcgacatgaatcctgaggctctcactgcgtggaaacgtgctaaagctgctgtgtaccgcagagacaaggctcgcaagtctcgccgtatcttgcttgagttcatgcttgagcaagccaataagtttgctaaccataaggccatctggttcccttacaacatggactggcgcggtcgtgtttacgctgtgtcaatgttcaacccgcaaggtaacgatatgaccaaaggactgcttacgctggcgaaaggtaaaccaatcggtaaggaaggttactactggctgaaaatccacggtgcaaactgtgcgggtgtcgataaggttccgttccctgagcgcatcaagttcattgaggaaaaccacgagaacatcatggcttgcgctaagtctccactggagaacacttggtgggctgagcaagatagtccgttctgcttccttgcgttctgctttgagtacgctggggtacagcaccacggcctgagctataactgctcccttccgctggcgtttgacgggtcttgctctggcatccagcacttctccgcgatgctccgagatgaggtaggtggtcgcgcggttaacttgcttcctagtgaaaccgttcaggacatctacgggattgttgctaagaaagtcaacgagattctacaagcagacgcaatcaatgggaccgataacgaagtagttaccgtgaccgatgagaacactggtgaaatctctgagaaagtcaagctgggcactaaggcactggctggtcaatggctggcttacggtgttactcgcagtgtgactaagcgttcagtcatgacgctggcttacgggtccaaagagttcggcttccgtcaacaagtgctgcgccacactattcagtgggctattgattccggcaaaggtctgatgttcactcagccgaatcaggctgctggatacatggctaagctgatttgggaatctgtgagcgtgacggtggtagctgcggttgaagcaatgaactggcttaagtctgctgctaagctgctggctgctgaggtcaaagataagaagactggagagattcttcgcaagcgttgcgctgtgcattgggtaactcctgatggtttccctgtgtggcaggaatacaagaagcctattcagacgcgcttgaacctgatgttcctcggtcagttccgcttacagcctaccattaacaccaacaaagatagcgagattgatgcacacaaacaggagtctggtatcgctcctaactttgtacacagccaagacggtagccaccttcgtaagactgtagtgtgggcacacgagaagtacggaatcgaatcttttgcactgattcacgactccttcggtaccattccggctgacgctgcgaacctgttcaaagcagtgcgcgaaactatggttgacacatatgagtcttgtgatgtactggctgatttctacgaccagttcgctgaccagttgcacgagtctcaattggacaaaatgccagcacttccggctaaaggtaacttgaacctccgtgacatcttagagtcggacttcgcgttcgcg

SEQ ID NO: 200 - protein, 890 aa, synthetic construct
  REGION 1..890: note = Variant of RNA polymerase
MHHHHHHMNTINIAKNDFSDIELAAIPFNTLADHYGERLAREQLALEHESYEMGEARFRKMFERQLKAGEVADNAAAKPLITTLLPKMIARINDWFEEVKAKRGKRPTAFQFLQEIKPEAVAYITIKTTLACLTSADRTTVQAVASAIGRAIEDEARFGRIRDLEAKHFKKNYEEQLNKRVGHVYKKAFMQVVEADMLSKGLLGGESWSSWHKEDSIHVGVRCIEMLIESTGMVSLHRQNAGVVGQDSETIELAPEYAEAIATRAGALAGISPMFQPCVVPPKPWTGITGGGYWANGRRPLALVRTHSKKGLMRYEDVYMPEVYKAINIAQNTAWKINKKVLAVANVITKWKHCPVRDIPAIEREELPMKPEDIDMNPEALTAWKRAKAAVYRRDKARKSRRILLEFMLEQANKFANHKAIWFPYNMDWRGRVYAVSMFNPQGNDMTKGLLTLAKGKPIGKEGYYWLKIHGANCAGVDKVPFPERIKFIEENHENIMACAKSPLENTWWAEQDSPFCFLAFCFEYAGVQHHGLSYNCSLPLAFDGSCSGIQHFSAMLRDEVGGRAVNLLPSETVQDIYGIVAKKVNEILQADAINGTDNEVVTVTDENTGEISEKVKLGTKALAGQWLAYGVTRSVTKRSVMTLAYGSKEFGFRQQVLRHTIQWAIDSGKGLMFTQPNQAAGYMAKLIWESVSVTVVAAVEAMNWLKSAAKLLAAEVKDKKTGEILRKRCAVHWVTPDGFPVWQEYKKPIQTRLNLMFLGQFRLQPTINTNKDSEIDAHKQESGIAPNFVHSQDGSHLRKTVVWAHEKYGIESFALIHDSFGTIPADAANLFKAVRETMVDTYESCDVLADFYDQFADQLHESQLDKMPALPAKGNLNLRDILESDFAFA

SEQ ID NO: 201 - DNA, 2670 bp, synthetic construct
  misc_feature 1..2670: note = Variant of RNA polymerase
  source 1..2670: mol_type = other DNA
atgcaccatcaccatcaccatatgaacacgattaacatcgctaagaacgacttctctgacatcgaactggctgctatcccgttcaacactctggctgaccattacggtgagcgtttagctcgcgaacagttggcccttgagcatgagtcttacgagatgggtgaagcacgtttccgcaagatgtttgagcgtcaacttaaagctggtgaggttgcggataacgctgccgccaagcctctcatcactaccctactccctaagatgattgcacgcatcaacgactggtttgaggaagtgaaagctaagcgcggcaagcgcccgacagccttccagttcctgcaagaaatcaagccggaagccgtagcgtacatcaccattaagaccactctggcttgcctaaccagtgcggaccgtacaaccgtacaggctgtagcaagcgcaatcggtcgggccattgaggacgaggctcgcttcggtcgtatccgtgaccttgaacgcaagcatctgaagaaaaactatgaggaacaactcaacaagcgcgtagggcacgtctacaagaaagcatttatgcaagttgtcgaggctgacatgctctctaagggtctactcggtggcgaggcgtggtcttcgtggcataaggaagactctattcatgtaggagtacgctgcatcgagatgctcattgagtcaaccggaatggttagcttacaccgccaaaatgctggcgtagtaggtcaagactctgagactatcgaactcgcacctgaatacgctgaggctatcgcaacccgtgcaggtgcgctggctggcatctctccgatgttccaaccttgcgtagttcctcctaagccgtggactggcattactggtggtggctattgggctaacggtcgtcgtcctctggcgctggtgcgtactcacagtaagaaaggtctgatgcgctacgaagacgtttacatgcctgaggtgtacaaagcgattaacattgcgcaaaacaccgcctggtcgatcaacaagtgggtcctggcggtcgccaacgtaatcaccaagtggaagcattgtccggtccgggacatccctgcgattgagcgtgaagaactcccgatgaaaccggaagacatcgacatgaatcctgaggctctcactgcgtggaaacgtgctaaagctgctgtgtaccgcagagacaaggctcgcaagtctcgccgtatcttgcttgagttcatgcttgagcaagccaataagtttgctaaccataaggccatctggttcccttacaacatggactggcgcggtcgtgtttacgctgtgtcaatgttcaacccgcaaggtaacgatatgaccaaaggactgcttacgctggcgaaaggtaaaccaatcggtaaggaaggttactactggctgaaaatccacggtgcaaactgtgcgggtgtcgataaggttccgttccctgagcgcatcaagttcattgaggaaaaccacgagaacatcatggcttgcgctaagtctccactggagaacacttggtgggctgagcaagatagtccgttctgcttccttgcgttctgctttgagtacgctggggtacagcaccacggcctgagctataactgctcccttccgctggcgtttgacgggtcttgctctggcatccagcacttctccgcgatgctccgagatgaggtaggtggtcgcgcggttaacttgcttcctagtgaaaccgttcaggacatctacgggattgttgctaagaaagtcaacgagattctacaagcagacgcaatcaatgggaccgataacgaagtagttaccgtgaccgatgagaacactggtgaaatctctgagaaagtcaagctgggcactaaggcactggctggtcaatggctggcttacggtgttactcgcagtgtgactaagcgttcagtcatgacgctggcttacgggtccaaagagttcggcttccgtcaacaagtgctgcgccacactattcagtgggctattgattccggcaaaggtctgatgttcactcagccgaatcaggctgctggatacatggctaagctgatttgggaatctgtgagcgtgacggtggtagctgcggttgaagcaatgaactggcttaagtctgctgctaagctgctggctgctgaggtcaaagataagaagactggagagattcttcgcaagcgttgcgctgtgcattgggtaactcctgatggtttccctgtgtggcaggaatacaagaagcctattcagacgcgcttgaacctgatgttcctcggtcagttccgcttacagcctaccattaacaccaacaaagatagcgagattgatgcacacaaacaggagtctggtatcgctcctaactttgtacacagccaagacggtagccaccttcgtaagactgtagtgtgggcacacgagaagtacggaatcgaatcttttgcactgattcacgactccttcggtaccattccggctgacgctgcgaacctgttcaaagcagtgcgcgaaactatggttgacacatatgagtcttgtgatgtactggctgatttctacgaccagttcgctgaccagttgcacgagtctcaattggacaaaatgccagcacttccggctaaaggtaacttgaacctccgtgacatcttagagtcggacttcgcgttcgcg

SEQ ID NO: 202 - protein, 890 aa, synthetic construct
  REGION 1..890: note = Variant of RNA polymerase
MHHHHHHMNTINIAKNDFSDIELAAIPFNTLADHYGERLAREQLALEHESYEMGEARFRKMFERQLKAGEVADNAAAKPLITTLLPKMIARINDWFEEVKAKRGKRPTAFQFLQEIKPEAVAYITIKTTLACLTSADRTTVQAVASAIGRAIEDEARFGRIRDLERKHLKKNYEEQLNKRVGHVYKKAFMQVVEADMLSKGLLGGEAWSSWHKEDSIHVGVRCIEMLIESTGMVSLHRQNAGVVGQDSETIELAPEYAEAIATRAGALAGISPMFQPCVVPPKPWTGITGGGYWANGRRPLALVRTHSKKGLMRYEDVYMPEVYKAINIAQNTAWSINKWVLAVANVITKWKHCPVRDIPAIEREELPMKPEDIDMNPEALTAWKRAKAAVYRRDKARKSRRILLEFMLEQANKFANHKAIWFPYNMDWRGRVYAVSMFNPQGNDMTKGLLTLAKGKPIGKEGYYWLKIHGANCAGVDKVPFPERIKFIEENHENIMACAKSPLENTWWAEQDSPFCFLAFCFEYAGVQHHGLSYNCSLPLAFDGSCSGIQHFSAMLRDEVGGRAVNLLPSETVQDIYGIVAKKVNEILQADAINGTDNEVVTVTDENTGEISEKVKLGTKALAGQWLAYGVTRSVTKRSVMTLAYGSKEFGFRQQVLRHTIQWAIDSGKGLMFTQPNQAAGYMAKLIWESVSVTVVAAVEAMNWLKSAAKLLAAEVKDKKTGEILRKRCAVHWVTPDGFPVWQEYKKPIQTRLNLMFLGQFRLQPTINTNKDSEIDAHKQESGIAPNFVHSQDGSHLRKTVVWAHEKYGIESFALIHDSFGTIPADAANLFKAVRETMVDTYESCDVLADFYDQFADQLHESQLDKMPALPAKGNLNLRDILESDFAFA

SEQ ID NO: 203 - DNA, 2670 bp, synthetic construct
  misc_feature 1..2670: note = Variant of RNA polymerase
  source 1..2670: mol_type = other DNA
atgcaccatcaccatcaccatatgaacacgattaacatcgctaagaacgacttctctgacatcgaactggctgctatcccgttcaacactctggctgaccattacggtgagcgtttagctcgcgaacagttggcccttgagcatgagtcttacgagatgggtgaagcacgtttccgcaagatgtttgagcgtcaacttaaagctggtgaggttgcggataacgctgccgccaagcctctcatcactaccctactccctaagatgattgcacgcatcaacgactggtttgaggaagtgaaagctaagcgcggcaagcgcccgacagccttccagttcctgcaagaaatcaagccggaagccgtagcgtacatcaccattaagaccactctggcttgcctaaccagtgcggaccgtacaaccgtacaggctgtagcaagcgcaatcggtcgggccattgaggacgaggctcgcttcggtcgtatccgtgaccttgaagctaagcatttcaagaaaaactatgaggaacaactcaacaagcgcgtagggcacgtctacaagaaagcatttatgcaagttgtcgaggctgacatgctctctaagggtctactcggtggcgagtcgtggtcttcgtggcataaggaagactctattcatgtaggagtacgctgcatcgagatgctcattgagtcaaccggaatggttagcttacaccgccaaaatgctggcgtagtaggtcaagactctgagactatcgaactcgcacctgaatacgctgaggctatcgcaacccgtgcaggtgcgctggctggcatctctccgatgttccaaccttgcgtagttcctcctaagccgtggactggcattactggtggtggctattgggctaacggtcgtcgtcctctggcgctggtgcgtactcacagtaagaaaggtctgatgcgctacgaagacgtttacatgcctgaggtgtacaaagcgattaacattgcgcaaaacaccgcctggtcgatcaacaagtgggtcctggcggtcgccaacgtaatcaccaagtggaagcattgtccggtccgggacatccctgcgattgagcgtgaagaactcccgatgaaaccggaagacatcgacatgaatcctgaggctctcactgcgtggaaacgtgctaaagctgctgtgtaccgcagagacaaggctcgcaagtctcgccgtatcttgcttgagttcatgcttgagcaagccaataagtttgctaaccataaggccatctggttcccttacaacatggactggcgcggtcgtgtttacgctgtgtcaatgttcaacccgcaaggtaacgatatgaccaaaggactgcttacgctggcgaaaggtaaaccaatcggtaaggaaggttactactggctgaaaatccacggtgcaaactgtgcgggtgtcgataaggttccgttccctgagcgcatcaagttcattgaggaaaaccacgagaacatcatggcttgcgctaagtctccactggagaacacttggtgggctgagcaagatagtccgttctgcttccttgcgttctgctttgagtacgctggggtacagcaccacggcctgagctataactgctcccttccgctggcgtttgacgggtcttgctctggcatccagcacttctccgcgatgctccgagatgaggtaggtggtcgcgcggttaacttgcttcctagtgaaaccgttcaggacatctacgggattgttgctaagaaagtcaacgagattctacaagcagacgcaatcaatgggaccgataacgaagtagttaccgtgaccgatgagaacactggtgaaatctctgagaaagtcaagctgggcactaaggcactggctggtcaatggctggcttacggtgttactcgcagtgtgactaagcgttcagtcatgacgctggcttacgggtccaaagagttcggcttccgtcaacaagtgctgcgccacactattcagtgggctattgattccggccgtggtctgatgttcactcagccgaatcaggctgctggatacatggctaagctgatttgggaatctgtgagcgtgacggtggtagctgcggttgaagcaatgaactggcttaagtctgctgctaagctgctggctgctgaggtcaaagataagaagactggagagattcttcgcaagcgttgcgctgtgcattgggtaactcctgatggtttccctgtgtggcaggaatacaagaagcctattcagacgcgcttgaacctgatgttcctcggtcagttccgcttacagcctaccattaacaccaacaaagatagcgagattgatgcacacaaacaggagtctggtatcgctcctaactttgtacacagccaagacggtagccaccttcgtaagactgtagtgtgggcacacgagaagtacggaatcgaatcttttgcactgattcacgactccttcggtaccattccggctgacgctgcgaacctgttcaaagcagtgcgcgaaactatggttgacacatatgagtcttgtgatgtactggctgatttctacgaccagttcgctgaccagttgcacgagtctcaattggacaaaatgccagcacttccggctaaaggtaacttgaacctccgtgacatcttagagtcggacttcgcgttcgcg

SEQ ID NO: 204 - protein, 890 aa, synthetic construct
  REGION 1..890: note = Variant of RNA polymerase
MHHHHHHMNTINIAKNDFSDIELAAIPFNTLADHYGERLAREQLALEHESYEMGEARFRKMFERQLKAGEVADNAAAKPLITTLLPKMIARINDWFEEVKAKRGKRPTAFQFLQEIKPEAVAYITIKTTLACLTSADRTTVQAVASAIGRAIEDEARFGRIRDLEAKHFKKNYEEQLNKRVGHVYKKAFMQVVEADMLSKGLLGGESWSSWHKEDSIHVGVRCIEMLIESTGMVSLHRQNAGVVGQDSETIELAPEYAEAIATRAGALAGISPMFQPCVVPPKPWTGITGGGYWANGRRPLALVRTHSKKGLMRYEDVYMPEVYKAINIAQNTAWSINKWVLAVANVITKWKHCPVRDIPAIEREELPMKPEDIDMNPEALTAWKRAKAAVYRRDKARKSRRILLEFMLEQANKFANHKAIWFPYNMDWRGRVYAVSMFNPQGNDMTKGLLTLAKGKPIGKEGYYWLKIHGANCAGVDKVPFPERIKFIEENHENIMACAKSPLENTWWAEQDSPFCFLAFCFEYAGVQHHGLSYNCSLPLAFDGSCSGIQHFSAMLRDEVGGRAVNLLPSETVQDIYGIVAKKVNEILQADAINGTDNEVVTVTDENTGEISEKVKLGTKALAGQWLAYGVTRSVTKRSVMTLAYGSKEFGFRQQVLRHTIQWAIDSGRGLMFTQPNQAAGYMAKLIWESVSVTVVAAVEAMNWLKSAAKLLAAEVKDKKTGEILRKRCAVHWVTPDGFPVWQEYKKPIQTRLNLMFLGQFRLQPTINTNKDSEIDAHKQESGIAPNFVHSQDGSHLRKTVVWAHEKYGIESFALIHDSFGTIPADAANLFKAVRETMVDTYESCDVLADFYDQFADQLHESQLDKMPALPAKGNLNLRDILESDFAFA

SEQ ID NO: 205 - DNA, 2670 bp, synthetic construct
  misc_feature 1..2670: note = Variant of RNA polymerase
  source 1..2670: mol_type = other DNA
atgcaccatcaccatcaccatatgaacacgattaacatcgctaagaacgacttctctgacatcgaactggctgctatcccgttcaacactctggctgaccattacggtgagcgtttagctcgcgaacagttggcccttgagcatgagtcttacgagatgggtgaagcacgtttccgcaagatgtttgagcgtcaacttaaagctggtgaggttgcggataacgctgccgccaagcctctcatcactaccctactccctaagatgattgcacgcatcaacgactggtttgaggaagtgaaagctaagcgcggcaagcgcccgacagccttccagttcctgcaagaaatcaagccggaagccgtagcgtacatcaccattaagaccactctggcttgcctaaccagtgcggaccgtacaaccgtacaggctgtagcaagcgcaatcggtcgggccattgaggacgaggctcgcttcggtcgtatccgtgaccttgaacgcaagcatttcaagaaaaactatgaggaacaactcaacaagcgcgtagggcacgtctacaagaaagcatttatgcaagttgtcgaggctgacatgctctctaagggtctactcggtggcgaggcgtggtcttcgtggcataaggaagactctattcatgtaggagtacgctgcatcgagatgctcattgagtcaaccggaatggttagcttacaccgccaaaatgctggcgtagtaggtcaagactctgagactatcgaactcgcacctgaatacgctgaggctatcgcaacccgtgcaggtgcgctggctggcatctctccgatgttccaaccttgcgtagttcctcctaagccgtggactggcattactggtggtggctattgggctaacggtcgtcgtcctctggcgctggtgcgtactcacagtaagaaaggtctgatgcgctacgaagacgtttacatgcctgaggtgtacaaagcgattaacattgcgcaaaacaccgcctggaagatcaacaagaaagtcctggcggtcgccaacgtaatcaccaagtggaagcattgtccggtccgggacatccctgcgattgagcgtgaagaactcccgatgaaaccggaagacatcgacatgaatcctgaggctctcactgcgtggaaacgtgctaaagctgctgtgtaccgcagagacaaggctcgcaagtctcgccgtatcttgcttgagttcatgcttgagcaagccaataagtttgctaaccataaggccatctggttcccttacaacatggactggcgcggtcgtgtttacgctgtgtcaatgttcaacccgcaaggtaacgatatgaccaaaggactgcttacgctggcgaaaggtaaaccaatcggtaaggaaggttactactggctgaaaatccacggtgcaaactgtgcgggtgtcgataaggttccgttccctgagcgcatcaagttcattgaggaaaaccacgagaacatcatggcttgcgctaagtctccactggagaacacttggtgggctgagcaagatagtccgttctgcttccttgcgttctgctttgagtacgctggggtacagcaccacggcctgagctataactgctcccttccgctggcgtttgacgggtcttgctctggcatccagcacttctccgcgatgctccgagatgaggtaggtggtcgcgcggttaacttgcttcctagtgaaaccgttcaggacatctacgggattgttgctaagaaagtcaacgagattctacaagcagacgcaatcaatgggaccgataacgaagtagttaccgtgaccgatgagaacactggtgaaatctctgagaaagtcaagctgggcactaaggcactggctggtcaatggctggcttacggtgttactcgcagtgtgactaagcgttcagtcatgacgctggcttacgggtccaaagagttcggcttccgtcaacaagtgctgcgccacactattcagtgggctattgattccggcaaaggtctgatgttcactcagccgaatcaggctgctggatacatggctaagctgatttgggaatctgtgagcgtgacggtggtagctgcggttgaagcaatgaactggcttaagtctgctgctaagctgctggctgctgaggtcaaagataagaagactggagagattcttcgcaagcgttgcgctgtgcattgggtaactcctgatggtttccctgtgtggcaggaatacaagaagcctattcagacgcgcttgaacctgatgttcctcggtcagttccgcttacagcctaccattaacaccaacaaagatagcgagattgatgcacacaaacaggagtctggtatcgctcctaactttgtacacagccaagacggtagccaccttcgtaagactgtagtgtgggcacacgagaagtacggaatcgaatcttttgcactgattcacgactccttcggtaccattccggctgacgctgcgaacctgttcaaagcagtgcgcgaaactatggttgacacatatgagtcttgtgatgtactggctgatttctacgaccagttcgctgaccagttgcacgagtctcaattggacaaaatgccagcacttccggctaaaggtaacttgaacctccgtgacatcttagagtcggacttcgcgttcgcg

SEQ ID NO: 206 - protein, 890 aa, synthetic construct
  REGION 1..890: note = Variant of RNA polymerase
MHHHHHHMNTINIAKNDFSDIELAAIPFNTLADHYGERLAREQLALEHESYEMGEARFRKMFERQLKAGEVADNAAAKPLITTLLPKMIARINDWFEEVKAKRGKRPTAFQFLQEIKPEAVAYITIKTTLACLTSADRTTVQAVASAIGRAIEDEARFGRIRDLERKHFKKNYEEQLNKRVGHVYKKAFMQVVEADMLSKGLLGGEAWSSWHKEDSIHVGVRCIEMLIESTGMVSLHRQNAGVVGQDSETIELAPEYAEAIATRAGALAGISPMFQPCVVPPKPWTGITGGGYWANGRRPLALVRTHSKKGLMRYEDVYMPEVYKAINIAQNTAWKINKKVLAVANVITKWKHCPVRDIPAIEREELPMKPEDIDMNPEALTAWKRAKAAVYRRDKARKSRRILLEFMLEQANKFANHKAIWFPYNMDWRGRVYAVSMFNPQGNDMTKGLLTLAKGKPIGKEGYYWLKIHGANCAGVDKVPFPERIKFIEENHENIMACAKSPLENTWWAEQDSPFCFLAFCFEYAGVQHHGLSYNCSLPLAFDGSCSGIQHFSAMLRDEVGGRAVNLLPSETVQDIYGIVAKKVNEILQADAINGTDNEVVTVTDENTGEISEKVKLGTKALAGQWLAYGVTRSVTKRSVMTLAYGSKEFGFRQQVLRHTIQWAIDSGKGLMFTQPNQAAGYMAKLIWESVSVTVVAAVEAMNWLKSAAKLLAAEVKDKKTGEILRKRCAVHWVTPDGFPVWQEYKKPIQTRLNLMFLGQFRLQPTINTNKDSEIDAHKQESGIAPNFVHSQDGSHLRKTVVWAHEKYGIESFALIHDSFGTIPADAANLFKAVRETMVDTYESCDVLADFYDQFADQLHESQLDKMPALPAKGNLNLRDILESDFAFA

SEQ ID NO: 207 - DNA, 2670 bp, synthetic construct
  misc_feature 1..2670: note = Variant of RNA polymerase
  source 1..2670: mol_type = other DNA
atgcaccatcaccatcaccatatgaacacgattaacatcgctaagaacgacttctctgacatcgaactggctgctatcccgttcaacactctggctgaccattacggtgagcgtttagctcgcgaacagttggcccttgagcatgagtcttacgagatgggtgaagcacgtttccgcaagatgtttgagcgtcaacttaaagctggtgaggttgcggataacgctgccgccaagcctctcatcactaccctactccctaagatgattgcacgcatcaacgactggtttgaggaagtgaaagctaagcgcggcaagcgcccgacagccttccagttcctgcaagaaatcaagccggaagccgtagcgtacatcaccattaagaccactctggcttgcctaaccagtgcggaccgtacaaccgtacaggctgtagcaagcgcaatcggtcgggccattgaggacgaggctcgcttcggtcgtatccgtgaccttgaagctaagcacttcaagaaaaactatgaggaacaactcaacaagcgcgtagggcacgtctacaagaaagcatttatgcaagttgtcgaggctgacatgctctctaagggtctactcggtggcgagtcgtggtcttcgtggcataaggaagactctattcatgtaggagtacgctgcatcgagatgctcattgagtcaaccggaatggttagcttacaccgccaaaatgctggcgtagtaggtcaagactctgagactatcgaactcgcacctgaatacgctgaggctatcgcaacccgtgcaggtgcgctggctggcatctctccgatgttccaaccttgcgtagttcctcctaagccgtggactggcattactggtggtggctattgggctaacggtcgtcgtcctctggcgctggtgcgtactcacagtaagaaaggtctgatgcgctacgaagacgtttacatgcctgaggtgtacaaagcgattaacattgcgcaaaacaccgcctggtcgatcaacaagtgggtcctggcggtcgccaacgtaatcaccaagtggaagcattgtccggtccgggacatccctgcgattgagcgtgaagaactcccgatgaaaccggaagacatcgacatgaatcctgaggctctcactgcgtggaaacgtgctaaagctgctgtgtaccgcagagacaaggctcgcaagtctcgccgtatcttgcttgagttcatgcttgagcaagccaataagtttgctaaccatcgtgccatctggttcccttacaacatggactggcgcggtcgtgtttacgctgtgtcaatgttcaacccgcaaggtaacgatatgaccaaaggactgcttacgctggcgaaaggtaaaccaatcggtaaggaaggttactactggctgaaaatccacggtgcaaactgtgcgggtgtcgataaggttccgttccctgagcgcatcaagttcattgaggaaaaccacgagaacatcatggcttgcgctaagtctccactggagaacacttggtgggctgagcaagatagtccgttctgcttccttgcgttctgctttgagtacgctggggtacagcaccacggcctgagctataactgctcccttccgctggcgtttgacgggtcttgctctggcatccagcacttctccgcgatgctccgagatgaggtaggtggtcgcgcggttaacttgcttcctagtgaaaccgttcaggacatctacgggattgttgctaagaaagtcaacgagattctacaagcagacgcaatcaatgggaccgataacgaagtagttaccgtgaccgatgagaacactggtgaaatctctgagaaagtcaagctgggcactaaggcactggctggtcaatggctggcttacggtgttactcgcagtgtgactaagcgttcagtcatgacgctggcttacgggtccaaagagttcggcttccgtcaacaagtgctgcgccacactattcagtgggctattgattccggccgtggtctgatgttcactcagccgaatcaggctgctggatacatggctaagctgatttgggaatctgtgagcgtgacggtggtagctgcggttgaagcaatgaactggcttaagtctgctgctaagctgctggctgctgaggtcaaagataagaagactggagagattcttcgcaagcgttgcgctgtgcattgggtaactcctgatggtttccctgtgtggcaggaatacaagaagcctattcagacgcgcttgaacctgatgttcctcggtcagttccgcttacagcctaccattaacaccaacaaagatagcgagattgatgcacacaaacaggagtctggtatcgctcctaactttgtacacagccaagacggtagccaccttcgtaagactgtagtgtgggcacacgagaagtacggaatcgaatcttttgcactgattcacgactccttcggtaccattccggctgacgctgcgaacctgttcaaagcagtgcgcgaaactatggttgacacatatgagtcttgtgatgtactggctgatttctacgaccagttcgctgaccagttgcacgagtctcaattggacaaaatgccagcacttccggctaaaggtaacttgaacctccgtgacatcttagagtcggacttcgcgttcgcg

SEQ ID NO: 208 - protein, 890 aa, synthetic construct
  REGION 1..890: note = Variant of RNA polymerase
MHHHHHHMNTINIAKNDFSDIELAAIPFNTLADHYGERLAREQLALEHESYEMGEARFRKMFERQLKAGEVADNAAAKPLITTLLPKMIARINDWFEEVKAKRGKRPTAFQFLQEIKPEAVAYITIKTTLACLTSADRTTVQAVASAIGRAIEDEARFGRIRDLEAKHFKKNYEEQLNKRVGHVYKKAFMQVVEADMLSKGLLGGESWSSWHKEDSIHVGVRCIEMLIESTGMVSLHRQNAGVVGQDSETIELAPEYAEAIATRAGALAGISPMFQPCVVPPKPWTGITGGGYWANGRRPLALVRTHSKKGLMRYEDVYMPEVYKAINIAQNTAWSINKWVLAVANVITKWKHCPVRDIPAIEREELPMKPEDIDMNPEALTAWKRAKAAVYRRDKARKSRRILLEFMLEQANKFANHRAIWFPYNMDWRGRVYAVSMFNPQGNDMTKGLLTLAKGKPIGKEGYYWLKIHGANCAGVDKVPFPERIKFIEENHENIMACAKSPLENTWWAEQDSPFCFLAFCFEYAGVQHHGLSYNCSLPLAFDGSCSGIQHFSAMLRDEVGGRAVNLLPSETVQDIYGIVAKKVNEILQADAINGTDNEVVTVTDENTGEISEKVKLGTKALAGQWLAYGVTRSVTKRSVMTLAYGSKEFGFRQQVLRHTIQWAIDSGRGLMFTQPNQAAGYMAKLIWESVSVTVVAAVEAMNWLKSAAKLLAAEVKDKKTGEILRKRCAVHWVTPDGFPVWQEYKKPIQTRLNLMFLGQFRLQPTINTNKDSEIDAHKQESGIAPNFVHSQDGSHLRKTVVWAHEKYGIESFALIHDSFGTIPADAANLFKAVRETMVDTYESCDVLADFYDQFADQLHESQLDKMPALPAKGNLNLRDILESDFAFA

SEQ ID NO: 209 - DNA, 2670 bp, synthetic construct
  misc_feature 1..2670: note = Variant of RNA polymerase
  source 1..2670: mol_type = other DNA
atgcaccatcaccatcaccatatgaacacgattaacatcgctaagaacgacttctctgacatcgaactggctgctatcccgttcaacactctggctgaccattacggtgagcgtttagctcgcgaacagttggcccttgagcatgagtcttacgagatgggtgaagcacgtttccgcaagatgtttgagcgtcaacttaaagctggtgaggttgcggataacgctgccgccaagcctctcatcactaccctactccctaagatgattgcacgcatcaacgactggtttgaggaagtgaaagctaagcgcggcaagcgcccgacagccttccagttcctgcaagaaatcaagccggaagccgtagcgtacatcaccattaagaccactctggcttgcctaaccagtgcggaccgtacaaccgtacaggctgtagcaagcgcaatcggtcgggccattgaggacgaggctcgcttcggtcgtatccgtgaccttgaagctaagcacttcaagaaaaactatgaggaacaactcaacaagcgcgtagggcacgtctacaagaaagcatttatgcaagttgtcgaggctgacatgctctctaagggtctactcggtggcgagtcgtggtcttcgtggcataaggaagactctattcatgtaggagtacgctgcatcgagatgctcattgagtcaaccggaatggttagcttacaccgccaaaatgctggcgtagtaggtcaagactctgagactatcgaactcgcacctgaatacgctgaggctatcgcaacccgtgcaggtgcgctggctggcatctctccgatgttccaaccttgcgtagttcctcctaagccgtggactggcattactggtggtggctattgggctaacggtcgtcgtcctctggcgctggtgcgtactcacagtaagaaaggtctgatgcgctacgaagacgtttacatgcctgaggtgtacaaagcgattaacattgcgcaaaacaccgcctggaagatcaacaagaaagtcctggcggttgccaacgtaatcaccaagtggaagcattgtccggtccgggacatccctgcgattgagcgtgaagaactcccgatgaaaccggaagacatcgacatgaatcctgaggctctcggggcgtggaaacgtgctaaagctgctgtgtaccgcagagacaaggctcgcaagtctcgccgtatcttgcttgagttcatgcttgagcaagccaataagtttgctaaccatcgtgccatctggttcccttacaacatggactggcgcggtcgtgtttacgctgtgtcaatgttcaacccgcaaggtaacgatatgaccaaaggactgcttacgctggcgaaaggtaaaccaatcggtaaggaaggttactactggctgaaaatccacggtgcaaactgtgcgggtgtcgataaggttccgttccctgagcgcatcaagttcattgaggaaaaccacgagaacatcatggcttgcgctaagtctccactggagaacacttggtgggctgagcaagatagtccgttctgcttccttgcgttctgctttgagtacgctggggtacagcaccacggcctgagctataactgctcccttccgctggcgtttgacgggtcttgctctggcatccagcacttctccgcgatgctccgagatgaggtaggtggtcgcgcggttaacttgcttcctagtgaaaccgttcaggacatctacgggattgttgctaagaaagtcaacgagattctacaagcagacgcaatcaatgggaccgataacgaagtagttaccgtgaccgatgagaacactggtgaaatctctgagaaagtcaagctgggcactaaggcactggctggtcaatggctggcttacggtgttactcgcagtgtgactaagcgttcagtcatgacgctggcttacgggtccaaagagttcggcttccgtcaacaagtgctgcgccacactattcagtgggctattgattccggccgtggtctgatgttcactcagccgaatcaggctgctggatacatggctaagctgatttgggaatctgtgagcgtgacggtggtagctgcggttgaagcaatgaactggcttaagtctgctgctaagctgctggctgctgaggtcaaagataagaagactggagagattcttcgcaagcgttgcgctgtgcattgggtaactcctgatggtttccctgtgtggcaggaatacaagaagcctattcagacgcgcttgaacctgatgttcctcggtcagttccgcttacagcctaccattaacaccaacaaagatagcgagattgatgcacacaaacaggagtctggtatcgctcctaactttgtacacagccaagacggtagccaccttcgtaagactgtagtgtgggcacacgagaagtacggaatcgaatcttttgcactgattcacgactccttcggtaccattccggctgacgctgcgaacctgttcaaagcagtgcgcgaaactatggttgacacatatgagtcttgtgatgtactggctgatttctacgaccagttcgctgaccagttgcacgagtctcaattggacaaaatgccagcacttccggctaaaggtaacttgaacctccgtgacatcttagagtcggacttcgcgttcgcg

SEQ ID NO: 210 - protein, 890 aa, synthetic construct
  REGION 1..890: note = Variant of RNA polymerase
MHHHHHHMNTINIAKNDFSDIELAAIPFNTLADHYGERLAREQLALEHESYEMGEARFRKMFERQLKAGEVADNAAAKPLITTLLPKMIARINDWFEEVKAKRGKRPTAFQFLQEIKPEAVAYITIKTTLACLTSADRTTVQAVASAIGRAIEDEARFGRIRDLEAKHFKKNYEEQLNKRVGHVYKKAFMQVVEADMLSKGLLGGESWSSWHKEDSIHVGVRCIEMLIESTGMVSLHRQNAGVVGQDSETIELAPEYAEAIATRAGALAGISPMFQPCVVPPKPWTGITGGGYWANGRRPLALVRTHSKKGLMRYEDVYMPEVYKAINIAQNTAWKINKKVLAVANVITKWKHCPVRDIPAIEREELPMKPEDIDMNPEALGAWKRAKAAVYRRDKARKSRRILLEFMLEQANKFANHRAIWFPYNMDWRGRVYAVSMFNPQGNDMTKGLLTLAKGKPIGKEGYYWLKIHGANCAGVDKVPFPERIKFIEENHENIMACAKSPLENTWWAEQDSPFCFLAFCFEYAGVQHHGLSYNCSLPLAFDGSCSGIQHFSAMLRDEVGGRAVNLLPSETVQDIYGIVAKKVNEILQADAINGTDNEVVTVTDENTGEISEKVKLGTKALAGQWLAYGVTRSVTKRSVMTLAYGSKEFGFRQQVLRHTIQWAIDSGRGLMFTQPNQAAGYMAKLIWESVSVTVVAAVEAMNWLKSAAKLLAAEVKDKKTGEILRKRCAVHWVTPDGFPVWQEYKKPIQTRLNLMFLGQFRLQPTINTNKDSEIDAHKQESGIAPNFVHSQDGSHLRKTVVWAHEKYGIESFALIHDSFGTIPADAANLFKAVRETMVDTYESCDVLADFYDQFADQLHESQLDKMPALPAKGNLNLRDILESDFAFA

SEQ ID NO: 211 - DNA, 2670 bp, synthetic construct
  misc_feature 1..2670: note = Variant of RNA polymerase
  source 1..2670: mol_type = other DNA
atgcaccatcaccatcaccatatgaacacgattaacatcgctaagaacgacttctctgacatcgaactggctgctatcccgttcaacactctggctgaccattacggtgagcgtttagctcgcgaacagttggcccttgagcatgagtcttacgagatgggtgaagcacgtttccgcaagatgtttgagcgtcaacttaaagctggtgaggttgcggataacgctgccgccaagcctctcatcactaccctactccctaagatgattgcacgcatcaacgactggtttgaggaagtgaaagctaagcgcggcaagcgcccgacagccttccagttcctgcaagaaatcaagccggaagccgtagcgtacatcaccattaagaccactctggcttgcctaaccagtgcggaccgtacaaccgttcaggctgtagcaagcgcaatcggtcgggccattgaggacgaggctcgcttcggtcgtatccgtgaccttgaagctaagcacttcaagaaaaactatgaggaacaactcaacaagcgcgtagggcacgtctacaagaaagcatttatgcaagttgtcgaggctgacatgctctctaagggtctactcggtggcgagtcgtggtcttcgtggcataaggaagactctattcatgtaggagtacgctgcatcgagatgctcattgagtcaaccggaatggttagcttacaccgccaaaatgctggcgtagtaggtcaagactctgagactatcgaactcgcacctgaatacgctgaggctatcgcaacccgtgcaggtgcgctggctggcatctctccgatgttccaaccttgcgtagttcctcctaagccgtggactggcattactggtggtggctattgggctaacggtcgtcgtcctctggcgctggtgcgtactcacagtaagaaaggtctgatgcgctacgaagacgtttacatgcctgaggtgtacaaagcgattaacattgcgcaaaacaccgcctggtcgatcaacaagtgggtcctggcggtcgccaacgtaatcaccaagtggaagcattgtccggtccgggacatccctgcgattgagcgtgaagaactcccgatgaaaccggaagacatcgacatgaatcctgaggctctcggggcgtggaaacgtgctaaagctgctgtgtaccgcagagacaaggctcgcaagtctcgccgtatcttgcttgagttcatgcttgagcaagccaataagtttgctaaccataaggccatctggttcccttacaacatggactggcgcggtcgtgtttacgctgtgtcaatgttcaacccgcaaggtaacgatatgaccaaaggactgcttacgctggcgaaaggtaaaccaatcggtaaggaaggttactactggctgaaaatccacggtgcaaactgtgcgggtgtcgataaggttccgttccctgagcgcatcaagttcattgaggaaaaccacgagaacatcatggcttgcgctaagtctccactggagaacacttggtgggctgagcaagatagtccgttctgcttccttgcgttctgctttgagtacgctggggtacagcaccacggcctgagctataactgctcccttccgctggcgtttgacgggtcttgctctggcatccagcacttctccgcgatgctccgagatgaggtaggtggtcgcgcggttaacttgcttcctagtgaaaccgttcaggacatctacgggattgttgctaagaaagtcaacgagattctacaagcagacgcaatcaatgggaccgataacgaagtagttaccgtgaccgatgagaacactggtgaaatctctgagaaagtcaagctgggcactaaggcactggctggtcaatggctggcttacggtgttactcgcagtgtgactaagcgttcagtcatgacgctggcttacgggtccaaagagttcggcttccgtcaacaagtgctgcgccacactattcagtgggctattgattccggcaagggtctgatgttcactcagccgaatcaggctgctggatacatggctaagctgatttgggaatctgtgagcgtgacggtggtagctgcggttgaagcaatgaactggcttaagtctgctgctaagctgctggctgctgaggtcaaagataagaagactggagagattcttcgcaagcgttgcgctgtgcattgggtaactcctgatggtttccctgtgtggcaggaatacaagaagcctattcagacgcgcttgaacctgatgttcctcggtcagttccgcttacagcctaccattaacaccaacaaagatagcgagattgatgcacacaaacaggagtctggtatcgctcctaactttgtacacagccaagacggtagccaccttcgtaagactgtagtgtgggcacacgagaagtacggaatcgaatcttttgcactgattcacgactccttcggtaccattccggctgacgctgcgaacctgttcaaagcagtgcgcgaaactatggttgacacatatgagtcttgtgatgtactggctgatttctacgaccagttcgctgaccagttgcacgagtctcaattggacaaaatgccagcacttccggctaaaggtaacttgaacctccgtgacatcttagagtcggacttcgcgttcgcg

SEQ ID NO: 212 - protein, 890 aa, synthetic construct
  REGION 1..890: note = Variant of RNA polymerase
MHHHHHHMNTINIAKNDFSDIELAAIPFNTLADHYGERLAREQLALEHESYEMGEARFRKMFERQLKAGEVADNAAAKPLITTLLPKMIARINDWFEEVKAKRGKRPTAFQFLQEIKPEAVAYITIKTTLACLTSADRTTVQAVASAIGRAIEDEARFGRIRDLEAKHFKKNYEEQLNKRVGHVYKKAFMQVVEADMLSKGLLGGESWSSWHKEDSIHVGVRCIEMLIESTGMVSLHRQNAGVVGQDSETIELAPEYAEAIATRAGALAGISPMFQPCVVPPKPWTGITGGGYWANGRRPLALVRTHSKKGLMRYEDVYMPEVYKAINIAQNTAWSINKWVLAVANVITKWKHCPVRDIPAIEREELPMKPEDIDMNPEALGAWKRAKAAVYRRDKARKSRRILLEFMLEQANKFANHKAIWFPYNMDWRGRVYAVSMFNPQGNDMTKGLLTLAKGKPIGKEGYYWLKIHGANCAGVDKVPFPERIKFIEENHENIMACAKSPLENTWWAEQDSPFCFLAFCFEYAGVQHHGLSYNCSLPLAFDGSCSGIQHFSAMLRDEVGGRAVNLLPSETVQDIYGIVAKKVNEILQADAINGTDNEVVTVTDENTGEISEKVKLGTKALAGQWLAYGVTRSVTKRSVMTLAYGSKEFGFRQQVLRHTIQWAIDSGKGLMFTQPNQAAGYMAKLIWESVSVTVVAAVEAMNWLKSAAKLLAAEVKDKKTGEILRKRCAVHWVTPDGFPVWQEYKKPIQTRLNLMFLGQFRLQPTINTNKDSEIDAHKQESGIAPNFVHSQDGSHLRKTVVWAHEKYGIESFALIHDSFGTIPADAANLFKAVRETMVDTYESCDVLADFYDQFADQLHESQLDKMPALPAKGNLNLRDILESDFAFA

SEQ ID NO: 213 - DNA, 2670 bp, synthetic construct
  misc_feature 1..2670: note = Variant of RNA polymerase
  source 1..2670: mol_type = other DNA
atgcaccatcaccatcaccatatgaacacgattaacatcgctaagaacgacttctctgacatcgaactggctgctatcccgttcaacactctggctgaccattacggtgagcgtttagctcgcgaacagttggcccttgagcatgagtcttacgagatgggtgaagcacgtttccgcaagatgtttgagcgtcaacttaaagctggtgaggttgcggataacgctgccgccaagcctctcatcactaccctactccctaagatgattgcacgcatcaacgactggtttgaggaagtgaaagctaagcgcggcaagcgcccgacagccttccagttcctgcaagaaatcaagccggaagccgtagcgtacatcaccattaagaccactctggcttgcctaaccagtgcggaccgtacaaccgttcaggctgtagcaagcgcaatcggtcgggccattgaggacgaggctcgcttcggtcgtatccgtgaccttgaagctaagcacttcaagaaaaactatgaggaacaactcaacaagcgcgtagggcacgtctacaagaaagcatttatgcaagttgtcgaggctgacatgctctctaagggtctactcggtggcgaggcgtggtcttcgtggcataaggaagactctattcatgtaggagtacgctgcatcgagatgctcattgagtcaaccggaatggttagcttacaccgccaaaatgctggcgtagtaggtcaagactctgagactatcgaactcgcacctgaatacgctgaggctatcgcaacccgtgcaggtgcgctggctggcatctctccgatgttccaaccttgcgtagttcctcctaagccgtggactggcattactggtggtggctattgggctaacggtcgtcgtcctctggcgctggtgcgtactcacagtaagaaaggtctgatgcgctacgaagacgtttacatgcctgaggtgtacaaagcgattaacattgcgcaaaacaccgcctggtcgatcaacaagtgggtcctggcggtcgccaacgtaatcaccaagtggaagcattgtccggtccgggacatccctgcgattgagcgtgaagaactcccgatgaaaccggaagacatcgacatgaatcctgaggctctcactgcgtggaaacgtgctaaagctgctgtgtaccgcagagacaaggctcgcaagtctcgccgtatcttgcttgagttcatgcttgagcaagccaataagtttgctaaccataaggccatctggttcccttacaacatggactggcgcggtcgtgtttacgctgtgtcaatgttcaacccgcaaggtaacgatatgaccaaaggactgcttacgctggcgaaaggtaaaccaatcggtaaggaaggttactactggctgaaaatccacggtgcaaactgtgcgggtgtcgataaggttccgttccctgagcgcatcaagttcattgaggaaaaccacgagaacatcatggcttgcgctaagtctccactggagaacacttggtgggctgagcaagatagtccgttctgcttccttgcgttctgctttgagtacgctggggtacagcaccacggcctgagctataactgctcccttccgctggcgtttgacgggtcttgctctggcatccagcacttctccgcgatgctccgagatgaggtaggtggtcgcgcggttaacttgcttcctagtgaaaccgttcaggacatctacgggattgttgctaagaaagtcaacgagattctacaagcagacgcaatcaatgggaccgataacgaagtagttaccgtgaccgatgagaacactggtgaaatctctgagaaagtcaagctgggcactaaggcactggctggtcaatggctggcttacggtgttactcgcagtgtgactaagcgttcagtcatgacgctggcttacgggtccaaagagttcggcttccgtcaacaagtgctgcgccacactattcagtgggctattgattccggccgtggtctgatgttcactcagccgaatcaggctgctggatacatggctaagctgatttgggaatctgtgagcgtgacggtggtagctgcggttgaagcaatgaactggcttaagtctgctgctaagctgctggctgctgaggtcaaagataagaagactggagagattcttcgcaagcgttgcgctgtgcattgggtaactcctgatggtttccctgtgtggcaggaatacaagaagcctattcagacgcgcttgaacctgatgttcctcggtcagttccgcttacagcctaccattaacaccaacaaagatagcgagattgatgcacacaaacaggagtctggtatcgctcctaactttgtacacagccaagacggtagccaccttcgtaagactgtagtgtgggcacacgagaagtacggaatcgaatcttttgcactgattcacgactccttcggtaccattccggctgacgctgcgaacctgttcaaagcagtgcgcgaaactatggttgacacatatgagtcttgtgatgtactggctgatttctacgaccagttcgctgaccagttgcacgagtctcaattggacaaaatgccagcacttccggctaaaggtaacttgaacctccgtgacatcttagagtcggacttcgcgttcgcg

SEQ ID NO: 214 - protein, 890 aa, synthetic construct
  REGION 1..890: note = Variant of RNA polymerase
MHHHHHHMNTINIAKNDFSDIELAAIPFNTLADHYGERLAREQLALEHESYEMGEARFRKMFERQLKAGEVADNAAAKPLITTLLPKMIARINDWFEEVKAKRGKRPTAFQFLQEIKPEAVAYITIKTTLACLTSADRTTVQAVASAIGRAIEDEARFGRIRDLEAKHFKKNYEEQLNKRVGHVYKKAFMQVVEADMLSKGLLGGEAWSSWHKEDSIHVGVRCIEMLIESTGMVSLHRQNAGVVGQDSETIELAPEYAEAIATRAGALAGISPMFQPCVVPPKPWTGITGGGYWANGRRPLALVRTHSKKGLMRYEDVYMPEVYKAINIAQNTAWSINKWVLAVANVITKWKHCPVRDIPAIEREELPMKPEDIDMNPEALTAWKRAKAAVYRRDKARKSRRILLEFMLEQANKFANHKAIWFPYNMDWRGRVYAVSMFNPQGNDMTKGLLTLAKGKPIGKEGYYWLKIHGANCAGVDKVPFPERIKFIEENHENIMACAKSPLENTWWAEQDSPFCFLAFCFEYAGVQHHGLSYNCSLPLAFDGSCSGIQHFSAMLRDEVGGRAVNLLPSETVQDIYGIVAKKVNEILQADAINGTDNEVVTVTDENTGEISEKVKLGTKALAGQWLAYGVTRSVTKRSVMTLAYGSKEFGFRQQVLRHTIQWAIDSGRGLMFTQPNQAAGYMAKLIWESVSVTVVAAVEAMNWLKSAAKLLAAEVKDKKTGEILRKRCAVHWVTPDGFPVWQEYKKPIQTRLNLMFLGQFRLQPTINTNKDSEIDAHKQESGIAPNFVHSQDGSHLRKTVVWAHEKYGIESFALIHDSFGTIPADAANLFKAVRETMVDTYESCDVLADFYDQFADQLHESQLDKMPALPAKGNLNLRDILESDFAFA

SEQ ID NO: 215 - DNA, 2670 bp, synthetic construct
  misc_feature 1..2670: note = Variant of RNA polymerase
  source 1..2670: mol_type = other DNA
atgcaccatcaccatcaccatatgaacacgattaacatcgctaagaacgacttctctgacatcgaactggctgctatcccgttcaacactctggctgaccattacggtgagcgtttagctcgcgaacagttggcccttgagcatgagtcttacgagatgggtgaagcacgtttccgcaagatgtttgagcgtcaacttaaagctggtgaggttgcggataacgctgccgccaagcctctcatcactaccctactccctaagatgattgcacgcatcaacgactggtttgaggaagtgaaagctaagcgcggcaagcgcccgacagccttccagttcctgcaagaaatcaagccggaagccgtagcgtacatcaccattaagaccactctggcttgcctaaccagtgcggaccgtacaaccgttcaggctgtagcaagcgcaatcggtcgggccattgaggacgaggctcgcttcggtcgtatccgtgaccttgaagctaagcacttcaagaaaaactatgaggaacaactcaacaagcgcgtagggcacgtctacaagaaagcatttatgcaagttgtcgaggctgacatgctctctaagggtctactcggtggcgaggcgtggtcttcgtggcataaggaagactctattcatgtaggagtacgctgcatcgagatgctcattgagtcaaccggaatggttagcttacaccgccaaaatgctggcgtagtaggtcaagactctgagactatcgaactcgcacctgaatacgctgaggctatcgcaacccgtgcaggtgcgctggctggcatctctccgatgttccaaccttgcgtagttcctcctaagccgtggactggcattactggtggtggctattgggctaacggtcgtcgtcctctggcgctggtgcgtactcacagtaagaaaggtctgatgcgctacgaagacgtttacatgcctgaggtgtacaaagcgattaacattgcgcaaaacaccgcctggaagatcaacaagtgggtcctggcggtcgccaacgtaatcaccaagtggaagcattgtccggtccgggacatccctgcgattgagcgtgaagaactcccgatgaaaccggaagacatcgacatgaatcctgaggctctcactgcgtggaaacgtgctaaagctgctgtgtaccgcagagacaaggctcgcaagtctcgccgtatcttgcttgagttcatgcttgagcaagccaataagtttgctaaccataaggccatctggttcccttacaacatggactggcgcggtcgtgtttacgctgtgtcaatgttcaacccgcaaggtaacgatatgaccaaaggactgcttacgctggcgaaaggtaaaccaatcggtaaggaaggttactactggctgaaaatccacggtgcaaactgtgcgggtgtcgataaggttccgttccctgagcgcatcaagttcattgaggaaaaccacgagaacatcatggcttgcgctaagtctccactggagaacacttggtgggctgagcaagatagtccgttctgcttccttgcgttctgctttgagtacgctggggtacagcaccacggcctgagctataactgctcccttccgctggcgtttgacgggtcttgctctggcatccagcacttctccgcgatgctccgagatgaggtaggtggtcgcgcggttaacttgcttcctagtgaaaccgttcaggacatctacgggattgttgctaagaaagtcaacgagattctacaagcagacgcaatcaatgggaccgataacgaagtagttaccgtgaccgatgagaacactggtgaaatctctgagaaagtcaagctgggcactaaggcactggctggtcaatggctggcttacggtgttactcgcagtgtgactaagcgttcagtcatgacgctggcttacgggtccaaagagttcggcttccgtcaacaagtgctgcgccacactattcagtgggctattgattccggccgtggtctgatgttcactcagccgaatcaggctgctggatacatggctaagctgatttgggaatctgtgagcgtgacggtggtagctgcggttgaagcaatgaactggcttaagtctgctgctaagctgctggctgctgaggtcaaagataagaagactggagagattcttcgcaagcgttgcgctgtgcattgggtaactcctgatggtttccctgtgtggcaggaatacaagaagcctattcagacgcgcttgaacctgatgttcctcggtcagttccgcttacagcctaccattaacaccaacaaagatagcgagattgatgcacacaaacaggagtctggtatcgctcctaactttgtacacagccaagacggtagccaccttcgtaagactgtagtgtgggcacacgagaagtacggaatcgaatcttttgcactgattcacgactccttcggtaccattccggctgacgctgcgaacctgttcaaagcagtgcgcgaaactatggttgacacatatgagtcttgtgatgtactggctgatttctacgaccagttcgctgaccagttgcacgagtctcaattggacaaaatgccagcacttccggctaaaggtaacttgaacctccgtgacatcttagagtcggacttcgcgttcgcg

SEQ ID NO: 216 - protein, 890 aa, synthetic construct
  REGION 1..890: note = Variant of RNA polymerase
MHHHHHHMNTINIAKNDFSDIELAAIPFNTLADHYGERLAREQLALEHESYEMGEARFRKMFERQLKAGEVADNAAAKPLITTLLPKMIARINDWFEEVKAKRGKRPTAFQFLQEIKPEAVAYITIKTTLACLTSADRTTVQAVASAIGRAIEDEARFGRIRDLEAKHFKKNYEEQLNKRVGHVYKKAFMQVVEADMLSKGLLGGEAWSSWHKEDSIHVGVRCIEMLIESTGMVSLHRQNAGVVGQDSETIELAPEYAEAIATRAGALAGISPMFQPCVVPPKPWTGITGGGYWANGRRPLALVRTHSKKGLMRYEDVYMPEVYKAINIAQNTAWKINKWVLAVANVITKWKHCPVRDIPAIEREELPMKPEDIDMNPEALTAWKRAKAAVYRRDKARKSRRILLEFMLEQANKFANHKAIWFPYNMDWRGRVYAVSMFNPQGNDMTKGLLTLAKGKPIGKEGYYWLKIHGANCAGVDKVPFPERIKFIEENHENIMACAKSPLENTWWAEQDSPFCFLAFCFEYAGVQHHGLSYNCSLPLAFDGSCSGIQHFSAMLRDEVGGRAVNLLPSETVQDIYGIVAKKVNEILQADAINGTDNEVVTVTDENTGEISEKVKLGTKALAGQWLAYGVTRSVTKRSVMTLAYGSKEFGFRQQVLRHTIQWAIDSGRGLMFTQPNQAAGYMAKLIWESVSVTVVAAVEAMNWLKSAAKLLAAEVKDKKTGEILRKRCAVHWVTPDGFPVWQEYKKPIQTRLNLMFLGQFRLQPTINTNKDSEIDAHKQESGIAPNFVHSQDGSHLRKTVVWAHEKYGIESFALIHDSFGTIPADAANLFKAVRETMVDTYESCDVLADFYDQFADQLHESQLDKMPALPAKGNLNLRDILESDFAFA

SEQ ID NO: 217 - DNA, 2670 bp, synthetic construct
  misc_feature 1..2670: note = Variant of RNA polymerase
  source 1..2670: mol_type = other DNA
atgcaccatcaccatcaccatatgaacacgattaacatcgctaagaacgacttctctgacatcgaactggctgctatcccgttcaacactctggctgaccattacggtgagcgtttagctcgcgaacagttggcccttgagcatgagtcttacgagatgggtgaagcacgtttccgcaagatgtttgagcgtcaacttaaagctggtgaggttgcggataacgctgccgccaagcctctcatcactaccctactccctaagatgattgcacgcatcaacgactggtttgaggaagtgaaagctaagcgcggcaagcgcccgacagccttccagttcctgcaagaaatcaagccggaagccgtagcgtacatcaccattaagaccactctggcttgcctaaccagtgcggaccgtacaaccgttcaggctgtagcaagcgcaatcggtcgggccattgaggacgaggctcgcttcggtcgtatccgtgaccttgaagctaagcacttcaagaaaaactatgaggaacaactcaacaagcgcgtagggcacgtctacaagaaagcatttatgcaagttgtcgaggctgacatgctctctaagggtctactcggtggcgaggcgtggtcttcgtggcataaggaagactctattcatgtaggagtacgctgcatcgagatgctcattgagtcaaccggaatggttagcttacaccgccaaaatgctggcgtagtaggtcaagactctgagactatcgaactcgcacctgaatacgctgaggctatcgcaacccgtgcaggtgcgctggctggcatctctccgatgttccaaccttgcgtagttcctcctaagccgtggactggcattactggtggtggctattgggctaacggtcgtcgtcctctggcgctggtgcgtactcacagtaagaaaggtctgatgcgctacgaagacgtttacatgcctgaggtgtacaaagcgattaacattgcgcaaaacaccgcctggtcgatcaacaagaaagtcctggcggtcgccaacgtaatcaccaagtggaagcattgtccggtccgggacatccctgcgattgagcgtgaagaactcccgatgaaaccggaagacatcgacatgaatcctgaggctctcaccgcgtggaaacgtgctaaagctgctgtgtaccgcagagacaaggctcgcaagtctcgccgtatcttgcttgagttcatgcttgagcaagccaataagtttgctaaccataaggccatctggttcccttacaacatggactggcgcggtcgtgtttacgctgtgtcaatgttcaacccgcaaggtaacgatatgaccaaaggactgcttacgctggcgaaaggtaaaccaatcggtaaggaaggttactactggctgaaaatccacggtgcaaactgtgcgggtgtcgataaggttccgttccctgagcgcatcaagttcattgaggaaaaccacgagaacatcatggcttgcgctaagtctccactggagaacacttggtgggctgagcaagatagtccgttctgcttccttgcgttctgctttgagtacgctggggtacagcaccacggcctgagctataactgctcccttccgctggcgtttgacgggtcttgctctggcatccagcacttctccgcgatgctccgagatgaggtaggtggtcgcgcggttaacttgcttcctagtgaaaccgttcaggacatctacgggattgttgctaagaaagtcaacgagattctacaagcagacgcaatcaatgggaccgataacgaagtagttaccgtgaccgatgagaacactggtgaaatctctgagaaagtcaagctgggcactaaggcactggctggtcaatggctggcttacggtgttactcgcagtgtgactaagcgttcagtcatgacgctggcttacgggtccaaagagttcggcttccgtcaacaagtgctgcgccacactattcagtgggctattgattccggccgtggtctgatgttcactcagccgaatcaggctgctggatacatggctaagctgatttgggaatctgtgagcgtgacggtggtagctgcggttgaagcaatgaactggcttaagtctgctgctaagctgctggctgctgaggtcaaagataagaagactggagagattcttcgcaagcgttgcgctgtgcattgggtaactcctgatggtttccctgtgtggcaggaatacaagaagcctattcagacgcgcttgaacctgatgttcctcggtcagttccgcttacagcctaccattaacaccaacaaagatagcgagattgatgcacacaaacaggagtctggtatcgctcctaactttgtacacagccaagacggtagccaccttcgtaagactgtagtgtgggcacacgagaagtacggaatcgaatcttttgcactgattcacgactccttcggtaccattccggctgacgctgcgaacctgttcaaagcagtgcgcgaaactatggttgacacatatgagtcttgtgatgtactggctgatttctacgaccagttcgctgaccagttgcacgagtctcaattggacaaaatgccagcacttccggctaaaggtaacttgaacctccgtgacatcttagagtcggacttcgcgttcgcg

SEQ ID NO: 218 - protein, 890 aa, synthetic construct
  REGION 1..890: note = Variant of RNA polymerase
MHHHHHHMNTINIAKNDFSDIELAAIPFNTLADHYGERLAREQLALEHESYEMGEARFRKMFERQLKAGEVADNAAAKPLITTLLPKMIARINDWFEEVKAKRGKRPTAFQFLQEIKPEAVAYITIKTTLACLTSADRTTVQAVASAIGRAIEDEARFGRIRDLEAKHFKKNYEEQLNKRVGHVYKKAFMQVVEADMLSKGLLGGEAWSSWHKEDSIHVGVRCIEMLIESTGMVSLHRQNAGVVGQDSETIELAPEYAEAIATRAGALAGISPMFQPCVVPPKPWTGITGGGYWANGRRPLALVRTHSKKGLMRYEDVYMPEVYKAINIAQNTAWSINKKVLAVANVITKWKHCPVRDIPAIEREELPMKPEDIDMNPEALTAWKRAKAAVYRRDKARKSRRILLEFMLEQANKFANHKAIWFPYNMDWRGRVYAVSMFNPQGNDMTKGLLTLAKGKPIGKEGYYWLKIHGANCAGVDKVPFPERIKFIEENHENIMACAKSPLENTWWAEQDSPFCFLAFCFEYAGVQHHGLSYNCSLPLAFDGSCSGIQHFSAMLRDEVGGRAVNLLPSETVQDIYGIVAKKVNEILQADAINGTDNEVVTVTDENTGEISEKVKLGTKALAGQWLAYGVTRSVTKRSVMTLAYGSKEFGFRQQVLRHTIQWAIDSGRGLMFTQPNQAAGYMAKLIWESVSVTVVAAVEAMNWLKSAAKLLAAEVKDKKTGEILRKRCAVHWVTPDGFPVWQEYKKPIQTRLNLMFLGQFRLQPTINTNKDSEIDAHKQESGIAPNFVHSQDGSHLRKTVVWAHEKYGIESFALIHDSFGTIPADAANLFKAVRETMVDTYESCDVLADFYDQFADQLHESQLDKMPALPAKGNLNLRDILESDFAFA

SEQ ID NO: 219 - DNA, 2670 bp, synthetic construct
  misc_feature 1..2670: note = Variant of RNA polymerase
  source 1..2670: mol_type = other DNA
atgcaccatcaccatcaccatatgaacacgattaacatcgctaagaacgacttctctgacatcgaactggctgctatcccgttcaacactctggctgaccattacggtgagcgtttagctcgcgaacagttggcccttgagcatgagtcttacgagatgggtgaagcacgtttccgcaagatgtttgagcgtcaacttaaagctggtgaggttgcggataacgctgccgccaagcctctcatcactaccctactccctaagatgattgcacgcatcaacgactggtttgaggaagtgaaagctaagcgcggcaagcgcccgacagccttccagttcctgcaagaaatcaagccggaagccgtagcgtacatcaccattaagaccactctggcttgcctaaccagtgcggaccgtacaaccgttcaggctgtagcaagcgcaatcggtcgggccattgaggacgaggctcgcttcggtcgtatccgtgaccttgaagctaagcacttcaagaaaaactatgaggaacaactcaacaagcgcgtagggcacgtctacaagaaagcatttatgcaagttgtcgaggctgacatgctctctaagggtctactcggtggcgaggcgtggtcttcgtggcataaggaagactctattcatgtaggagtacgctgcatcgagatgctcattgagtcaaccggaatggttagcttacaccgccaaaatgctggcgtagtaggtcaagactctgagactatcgaactcgcacctgaatacgctgaggctatcgcaacccgtgcaggtgcgctggctggcatctctccgatgttccaaccttgcgtagttcctcctaagccgtggactggcattactggtggtggctattgggctaacggtcgtcgtcctctggcgctggtgcgtactcacagtaagaaaggtctgatgcgctacgaagacgtttacatgcctgaggtgtacaaagcgattaacattgcgcaaaacaccgcctggtcgatcaacaagtgggtcctggcggtcgccaacgtaatcaccaagtggaagcattgtccggtccgggacatccctgcgattgagcgtgaagaactcccgatgaaaccggaagacatcgacatgaatcctgaggctctcggggcgtggaaacgtgctaaagctgctgtgtaccgcagagacaaggctcgcaagtctcgccgtatcttgcttgagttcatgcttgagcaagccaataagtttgctaaccataaggccatctggttcccttacaacatggactggcgcggtcgtgtttacgctgtgtcaatgttcaacccgcaaggtaacgatatgaccaaaggactgcttacgctggcgaaaggtaaaccaatcggtaaggaaggttactactggctgaaaatccacggtgcaaactgtgcgggtgtcgataaggttccgttccctgagcgcatcaagttcattgaggaaaaccacgagaacatcatggcttgcgctaagtctccactggagaacacttggtgggctgagcaagatagtccgttctgcttccttgcgttctgctttgagtacgctggggtacagcaccacggcctgagctataactgctcccttccgctggcgtttgacgggtcttgctctggcatccagcacttctccgcgatgctccgagatgaggtaggtggtcgcgcggttaacttgcttcctagtgaaaccgttcaggacatctacgggattgttgctaagaaagtcaacgagattctacaagcagacgcaatcaatgggaccgataacgaagtagttaccgtgaccgatgagaacactggtgaaatctctgagaaagtcaagctgggcactaaggcactggctggtcaatggctggcttacggtgttactcgcagtgtgactaagcgttcagtcatgacgctggcttacgggtccaaagagttcggcttccgtcaacaagtgctgcgccacactattcagtgggctattgattccggcaaaggtctgatgttcactcagccgaatcaggctgctggatacatggctaagctgatttgggaatctgtgagcgtgacggtggtagctgcggttgaagcaatgaactggcttaagtctgctgctaagctgctggctgctgaggtcaaagataagaagactggagagattcttcgcaagcgttgcgctgtgcattgggtaactcctgatggtttccctgtgtggcaggaatacaagaagcctattcagacgcgcttgaacctgatgttcctcggtcagttccgcttacagcctaccattaacaccaacaaagatagcgagattgatgcacacaaacaggagtctggtatcgctcctaactttgtacacagccaagacggtagccaccttcgtaagactgtagtgtgggcacacgagaagtacggaatcgaatcttttgcactgattcacgactccttcggtaccattccggctgacgctgcgaacctgttcaaagcagtgcgcgaaactatggttgacacatatgagtcttgtgatgtactggctgatttctacgaccagttcgctgaccagttgcacgagtctcaattggacaaaatgccagcacttccggctaaaggtaacttgaacctccgtgacatcttagagtcggacttcgcgttcgcg

SEQ ID NO: 220 - protein, 890 aa, synthetic construct
  REGION 1..890: note = Variant of RNA polymerase
MHHHHHHMNTINIAKNDFSDIELAAIPFNTLADHYGERLAREQLALEHESYEMGEARFRKMFERQLKAGEVADNAAAKPLITTLLPKMIARINDWFEEVKAKRGKRPTAFQFLQEIKPEAVAYITIKTTLACLTSADRTTVQAVASAIGRAIEDEARFGRIRDLEAKHFKKNYEEQLNKRVGHVYKKAFMQVVEADMLSKGLLGGEAWSSWHKEDSIHVGVRCIEMLIESTGMVSLHRQNAGVVGQDSETIELAPEYAEAIATRAGALAGISPMFQPCVVPPKPWTGITGGGYWANGRRPLALVRTHSKKGLMRYEDVYMPEVYKAINIAQNTAWSINKWVLAVANVITKWKHCPVRDIPAIEREELPMKPEDIDMNPEALGAWKRAKAAVYRRDKARKSRRILLEFMLEQANKFANHKAIWFPYNMDWRGRVYAVSMFNPQGNDMTKGLLTLAKGKPIGKEGYYWLKIHGANCAGVDKVPFPERIKFIEENHENIMACAKSPLENTWWAEQDSPFCFLAFCFEYAGVQHHGLSYNCSLPLAFDGSCSGIQHFSAMLRDEVGGRAVNLLPSETVQDIYGIVAKKVNEILQADAINGTDNEVVTVTDENTGEISEKVKLGTKALAGQWLAYGVTRSVTKRSVMTLAYGSKEFGFRQQVLRHTIQWAIDSGKGLMFTQPNQAAGYMAKLIWESVSVTVVAAVEAMNWLKSAAKLLAAEVKDKKTGEILRKRCAVHWVTPDGFPVWQEYKKPIQTRLNLMFLGQFRLQPTINTNKDSEIDAHKQESGIAPNFVHSQDGSHLRKTVVWAHEKYGIESFALIHDSFGTIPADAANLFKAVRETMVDTYESCDVLADFYDQFADQLHESQLDKMPALPAKGNLNLRDILESDFAFA

SEQ ID NO: 221 - DNA, 2670 bp, synthetic construct
  misc_feature 1..2670: note = Variant of RNA polymerase
  source 1..2670: mol_type = other DNA
atgcaccatcaccatcaccatatgaacacgattaacatcgctaagaacgacttctctgacatcgaactggctgctatcccgttcaacactctggctgaccattacggtgagcgtttagctcgcgaacagttggcccttgagcatgagtcttacgagatgggtgaagcacgtttccgcaagatgtttgagcgtcaacttaaagctggtgaggttgcggataacgctgccgccaagcctctcatcactaccctactccctaagatgattgcacgcatcaacgactggtttgaggaagtgaaagctaagcgcggcaagcgcccgacagccttccagttcctgcaagaaatcaagccggaagccgtagcgtacatcaccattgggaccactctggcttgcctaaccagtgcggaccgtacaaccgcacaggctgtagcaagcgcaatcggtcgggccattgaggacgaggctcgcttcggtcgtatccgtgaccttgaagctaagcacttcaagaaaaactatgaggaacaactcaacaagcgcgtagggcacgtctacaagaaagcatttatgcaagttgtcgaggctgacatgctctctaagggtctactcggtggcgagtcgtggtcttcgtggcataaggaagactctattcatgtaggagtacgctgcatcgagatgctcattgagtcaaccggaatggttagcttacaccgccaaaatgctggcgtagtaggtcaagactctgagactatcgaactcgcacctgaatacgctgaggctatcgcaacccgtgcaggtgcgctggctggcatctctccgatgttccaaccttgcgtagttcctcctaagccgtggactggcattactggtggtggctattgggctaacggtcgtcgtcctctggcgctggtgcgtactcacagtaagaaaggtctgatgcgctacgaagacgtttacatgcctgaggtgtacaaagcgattaacattgcgcaaaacaccgcctggaagatcaacaagtgggtcctggcggtcgccaacgtaatcaccaagtggaagcattgtccggtccgggacatccctgcgattgagcgtgaagaactcccgatgaaaccggaagacatcgacatgaatcctgaggctctcggggcgtggaaacgtgctaaagctgctgtgtaccgcagagacaaggctcgcaagtctcgccgtatcttgcttgagttcatgcttgagcaagccaataagtttgctaaccataaggccatctggttcccttacaacatggactggcgcggtcgtgtttacgctgtgtcaatgttcaacccgcaaggtaacgatatgaccaaaggactgcttacgctggcgaaaggtaaaccaatcggtaaggaaggttactactggctgaaaatccacggtgcaaactgtgcgggtgtcgataaggttccgttccctgagcgcatcaagttcattgaggaaaaccacgagaacatcatggcttgcgctaagtctccactggagaacacttggtgggctgagcaagatagtccgttctgcttccttgcgttctgctttgagtacgctggggtacagcaccacggcctgagctataactgctcccttccgctggcgtttgacgggtcttgctctggcatccagcacttctccgcgatgctccgagatgaggtaggtggtcgcgcggttaacttgcttcctagtgaaaccgttcaggacatctacgggattgttgctaagaaagtcaacgagattctacaagcagacgcaatcaatgggaccgataacgaagtagttaccgtgaccgatgagaacactggtgaaatctctgagaaagtcaagctgggcactaaggcactggctggtcaatggctggcttacggtgttactcgcagtgtgactaagcgttcagtcatgacgctggcttacgggtccaaagagttcggcttccgtcaacaagtgctgcgccacactattcagtgggctattgattccggccgtggtctgatgttcactcagccgaatcaggctgctggatacatggctaagctgatttgggaatctgtgagcgtgacggtggtagctgcggttgaagcaatgaactggcttaagtctgctgctaagctgctggctgctgaggtcaaagataagaagactggagagattcttcgcaagcgttgcgctgtgcattgggtaactcctgatggtttccctgtgtggcaggaatacaagaagcctattcagacgcgcttgaacctgatgttcctcggtcagttccgcttacagcctaccattaacaccaacaaagatagcgagattgatgcacacaaacaggagtctggtatcgctcctaactttgtacacagccaagacggtagccaccttcgtaagactgtagtgtgggcacacgagaagtacggaatcgaatcttttgcactgattcacgactccttcggtaccattccggctgacgctgcgaacctgttcaaagcagtgcgcgaaactatggttgacacatatgagtcttgtgatgtactggctgatttctacgaccagttcgctgaccagttgcacgagtctcaattggacaaaatgccagcacttccggctaaaggtaacttgaacctccgtgacatcttagagtcggacttcgcgttcgcg

SEQ ID NO: 222 - protein, 890 aa, synthetic construct
  REGION 1..890: note = Variant of RNA polymerase
MHHHHHHMNTINIAKNDFSDIELAAIPFNTLADHYGERLAREQLALEHESYEMGEARFRKMFERQLKAGEVADNAAAKPLITTLLPKMIARINDWFEEVKAKRGKRPTAFQFLQEIKPEAVAYITIGTTLACLTSADRTTAQAVASAIGRAIEDEARFGRIRDLEAKHFKKNYEEQLNKRVGHVYKKAFMQVVEADMLSKGLLGGESWSSWHKEDSIHVGVRCIEMLIESTGMVSLHRQNAGVVGQDSETIELAPEYAEAIATRAGALAGISPMFQPCVVPPKPWTGITGGGYWANGRRPLALVRTHSKKGLMRYEDVYMPEVYKAINIAQNTAWKINKWVLAVANVITKWKHCPVRDIPAIEREELPMKPEDIDMNPEALGAWKRAKAAVYRRDKARKSRRILLEFMLEQANKFANHKAIWFPYNMDWRGRVYAVSMFNPQGNDMTKGLLTLAKGKPIGKEGYYWLKIHGANCAGVDKVPFPERIKFIEENHENIMACAKSPLENTWWAEQDSPFCFLAFCFEYAGVQHHGLSYNCSLPLAFDGSCSGIQHFSAMLRDEVGGRAVNLLPSETVQDIYGIVAKKVNEILQADAINGTDNEVVTVTDENTGEISEKVKLGTKALAGQWLAYGVTRSVTKRSVMTLAYGSKEFGFRQQVLRHTIQWAIDSGRGLMFTQPNQAAGYMAKLIWESVSVTVVAAVEAMNWLKSAAKLLAAEVKDKKTGEILRKRCAVHWVTPDGFPVWQEYKKPIQTRLNLMFLGQFRLQPTINTNKDSEIDAHKQESGIAPNFVHSQDGSHLRKTVVWAHEKYGIESFALIHDSFGTIPADAANLFKAVRETMVDTYESCDVLADFYDQFADQLHESQLDKMPALPAKGNLNLRDILESDFAFA

SEQ ID NO: 223 - DNA, 2670 bp, synthetic construct
  misc_feature 1..2670: note = Variant of RNA polymerase
  source 1..2670: mol_type = other DNA
atgcaccatcaccatcaccatatgaacacgattaacatcgctaagaacgacttctctgacatcgaactggctgctatcccgttcaacactctggctgaccattacggtgagcgtttagctcgcgaacagttggcccttgagcatgagtcttacgagatgggtgaagcacgtttccgcaagatgtttgagcgtcaacttaaagctggtgaggttgcggataacgctgccgccaagcctctcatcactaccctactccctaagatgattgcacgcatcaacgactggtttgaggaagtgaaagctaagcgcggcaagcgcccgacagccttccagttcctgcaagaaatcaagccggaagccgtagcgtacatcaccattaagaccactctggcttgcctaaccagtgcggaccgtacaaccgtacaggctgtagcaagcgcaatcggtcgggccattgaggacgaggctcgcttcggtcgtatccgtgaccttgaagctaagcacttcaagaaaaactatgaggaacaactcaacaagcgcgtagggcacgtctacaagaaagcatttatgcaagttgtcgaggctgacatgctctctaagggtctactcggtggcgagtcgtggtcttcgtggcataaggaagactctattcatgtaggagtacgctgcatcgagatgctcattgagtcaaccggaatggttagcttacaccgccaaaatgctggcgtagtaggtcaagactctgagactatcgaactcgcacctgaatacgctgaggctatcgcaacccgtgcaggtgcgctggctggcatctctccgatgttccaaccttgcgtagttcctcctaagccgtggactggcattactggtggtggctattgggctaacggtcgtcgtcctctggcgctggtgcgtactcacagtaagaaaggtctgatgcgctacgaagacgtttacatgcctgaggtgtacaaagcgattaacattgcgcaaaacaccgcctggaagatcaacaagtgggtcctggcggtcgccaacgtaatcaccaagtggaagcattgtccggtccgggacatccctgcgattgagcgtgaagaactcccgatgaaaccggaagacatcgacatgaatcctgaggctctcggggcgtggaaacgtgctaaagctgctgtgtaccgcagagacaaggctcgcaagtctcgccgtatcttgcttgagttcatgcttgagcaagccaataagtttgctaaccatcgtgccatctggttcccttacaacatggactggcgcggtcgtgtttacgctgtgtcaatgttcaacccgcaaggtaacgatatgaccaaaggactgcttacgctggcgaaaggtaaaccaatcggtaaggaaggttactactggctgaaaatccacggtgcaaactgtgcgggtgtcgataaggttccgttccctgagcgcatcaagttcattgaggaaaaccacgagaacatcatggcttgcgctaagtctccactggagaacacttggtgggctgagcaagatagtccgttctgcttccttgcgttctgctttgagtacgctggggtacagcaccacggcctgagctataactgctcccttccgctggcgtttgacgggtcttgctctggcatccagcacttctccgcgatgctccgagatgaggtaggtggtcgcgcggttaacttgcttcctagtgaaaccgttcaggacatctacgggattgttgctaagaaagtcaacgagattctacaagcagacgcaatcaatgggaccgataacgaagtagttaccgtgaccgatgagaacactggtgaaatctctgagaaagtcaagctgggcactaaggcactggctggtcaatggctggcttacggtgttactcgcagtgtgactaagcgttcagtcatgacgctggcttacgggtccaaagagttcggcttccgtcaacaagtgctgcgccacactattcagtgggctattgattccggccgtggtctgatgttcactcagccgaatcaggctgctggatacatggctaagctgatttgggaatctgtgagcgtgacggtggtagctgcggttgaagcaatgaactggcttaagtctgctgctaagctgctggctgctgaggtcaaagataagaagactggagagattcttcgcaagcgttgcgctgtgcattgggtaactcctgatggtttccctgtgtggcaggaatacaagaagcctattcagacgcgcttgaacctgatgttcctcggtcagttccgcttacagcctaccattaacaccaacaaagatagcgagattgatgcacacaaacaggagtctggtatcgctcctaactttgtacacagccaagacggtagccaccttcgtaagactgtagtgtgggcacacgagaagtacggaatcgaatcttttgcactgattcacgactccttcggtaccattccggctgacgctgcgaacctgttcaaagcagtgcgcgaaactatggttgacacatatgagtcttgtgatgtactggctgatttctacgaccagttcgctgaccagttgcacgagtctcaattggacaaaatgccagcacttccggctaaaggtaacttgaacctccgtgacatcttagagtcggacttcgcgttcgcg

SEQ ID NO: 224 - protein, 890 aa, synthetic construct
  REGION 1..890: note = Variant of RNA polymerase
MHHHHHHMNTINIAKNDFSDIELAAIPFNTLADHYGERLAREQLALEHESYEMGEARFRKMFERQLKAGEVADNAAAKPLITTLLPKMIARINDWFEEVKAKRGKRPTAFQFLQEIKPEAVAYITIKTTLACLTSADRTTVQAVASAIGRAIEDEARFGRIRDLEAKHFKKNYEEQLNKRVGHVYKKAFMQVVEADMLSKGLLGGESWSSWHKEDSIHVGVRCIEMLIESTGMVSLHRQNAGVVGQDSETIELAPEYAEAIATRAGALAGISPMFQPCVVPPKPWTGITGGGYWANGRRPLALVRTHSKKGLMRYEDVYMPEVYKAINIAQNTAWKINKWVLAVANVITKWKHCPVRDIPAIEREELPMKPEDIDMNPEALGAWKRAKAAVYRRDKARKSRRILLEFMLEQANKFANHRAIWFPYNMDWRGRVYAVSMFNPQGNDMTKGLLTLAKGKPIGKEGYYWLKIHGANCAGVDKVPFPERIKFIEENHENIMACAKSPLENTWWAEQDSPFCFLAFCFEYAGVQHHGLSYNCSLPLAFDGSCSGIQHFSAMLRDEVGGRAVNLLPSETVQDIYGIVAKKVNEILQADAINGTDNEVVTVTDENTGEISEKVKLGTKALAGQWLAYGVTRSVTKRSVMTLAYGSKEFGFRQQVLRHTIQWAIDSGRGLMFTQPNQAAGYMAKLIWESVSVTVVAAVEAMNWLKSAAKLLAAEVKDKKTGEILRKRCAVHWVTPDGFPVWQEYKKPIQTRLNLMFLGQFRLQPTINTNKDSEIDAHKQESGIAPNFVHSQDGSHLRKTVVWAHEKYGIESFALIHDSFGTIPADAANLFKAVRETMVDTYESCDVLADFYDQFADQLHESQLDKMPALPAKGNLNLRDILESDFAFA

SEQ ID NO: 225 - DNA, 2670 bp, synthetic construct
  misc_feature 1..2670: note = Variant of RNA polymerase
  source 1..2670: mol_type = other DNA
atgcaccatcaccatcaccatatgaacacgattaacatcgctaagaacgacttctctgacatcgaactggctgctatcccgttcaacactctggctgaccattacggtgagcgtttagctcgcgaacagttggcccttgagcatgagtcttacgagatgggtgaagcacgtttccgcaagatgtttgagcgtcaacttaaagctggtgaggttgcggataacgctgccgccaagcctctcatcactaccctactccctaagatgattgcacgcatcaacgactggtttgaggaagtgaaagctaagcgcggcaagcgcccgacagccttccagttcctgcaagaaatcaagccggaagccgtagcgtacatcaccattaagaccactctggcttgcctaaccagtgcggaccgtacaaccgtacaggctgtagcaagcgcaatcggtcgggccattgaggacgaggctcgcttcggtcgtatccgtgaccttgaagctaagcacttcaagaaaaactatgaggaacaactcaacaagcgcgtagggcacgtctacaagaaagcatttatgcaagttgtcgaggctgacatgctctctaagggtctactcggtggcgaggcgtggtcttcgtggcataaggaagactctattcatgtaggagtacgctgcatcgagatgctcattgagtcaaccggaatggttagcttacaccgccaaaatgctggcgtagtaggtcaagactctgagactatcgaactcgcacctgaatacgctgaggctatcgcaacccgtgcaggtgcgctggctggcatctctccgatgttccaaccttgcgtagttcctcctaagccgtggactggcattactggtggtggctattgggctaacggtcgtcgtcctctggcgctggtgcgtactcacagtaagaaaggtctgatgcgctacgaagacgtttacatgcctgaggtgtacaaagcgattaacattgcgcaaaacaccgcctggtcgatcaacaagtgggtcctggcggtcgccaacgtaatcaccaagtggaagcattgtccggtccgggacatccctgcgattgagcgtgaagaactcccgatgaaaccggaagacatcgacatgaatcctgaggctctcaccgcgtggaaacgtgctaaagctgctgtgtaccgcagagacaaggctcgcaagtctcgccgtatcttgcttgagttcatgcttgagcaagccaataagtttgctaaccatcgtgccatctggttcccttacaacatggactggcgcggtcgtgtttacgctgtgtcaatgttcaacccgcaaggtaacgatatgaccaaaggactgcttacgctggcgaaaggtaaaccaatcggtaaggaaggttactactggctgaaaatccacggtgcaaactgtgcgggtgtcgataaggttccgttccctgagcgcatcaagttcattgaggaaaaccacgagaacatcatggcttgcgctaagtctccactggagaacacttggtgggctgagcaagatagtccgttctgcttccttgcgttctgctttgagtacgctggggtacagcaccacggcctgagctataactgctcccttccgctggcgtttgacgggtcttgctctggcatccagcacttctccgcgatgctccgagatgaggtaggtggtcgcgcggttaacttgcttcctagtgaaaccgttcaggacatctacgggattgttgctaagaaagtcaacgagattctacaagcagacgcaatcaatgggaccgataacgaagtagttaccgtgaccgatgagaacactggtgaaatctctgagaaagtcaagctgggcactaaggcactggctggtcaatggctggcttacggtgttactcgcagtgtgactaagcgttcagtcatgacgctggcttacgggtccaaagagttcggcttccgtcaacaagtgctgcgccacactattcagtgggctattgattccggccgtggtctgatgttcactcagccgaatcaggctgctggatacatggctaagctgatttgggaatctgtgagcgtgacggtggtagctgcggttgaagcaatgaactggcttaagtctgctgctaagctgctggctgctgaggtcaaagataagaagactggagagattcttcgcaagcgttgcgctgtgcattgggtaactcctgatggtttccctgtgtggcaggaatacaagaagcctattcagacgcgcttgaacctgatgttcctcggtcagttccgcttacagcctaccattaacaccaacaaagatagcgagattgatgcacacaaacaggagtctggtatcgctcctaactttgtacacagccaagacggtagccaccttcgtaagactgtagtgtgggcacacgagaagtacggaatcgaatcttttgcactgattcacgactccttcggtaccattccggctgacgctgcgaacctgttcaaagcagtgcgcgaaactatggttgacacatatgagtcttgtgatgtactggctgatttctacgaccagttcgctgaccagttgcacgagtctcaattggacaaaatgccagcacttccggctaaaggtaacttgaacctccgtgacatcttagagtcggacttcgcgttcgcg

SEQ ID NO: 226 - protein, 890 aa, synthetic construct
  REGION 1..890: note = Variant of RNA polymerase
MHHHHHHMNTINIAKNDFSDIELAAIPFNTLADHYGERLAREQLALEHESYEMGEARFRKMFERQLKAGEVADNAAAKPLITTLLPKMIARINDWFEEVKAKRGKRPTAFQFLQEIKPEAVAYITIKTTLACLTSADRTTVQAVASAIGRAIEDEARFGRIRDLEAKHFKKNYEEQLNKRVGHVYKKAFMQVVEADMLSKGLLGGEAWSSWHKEDSIHVGVRCIEMLIESTGMVSLHRQNAGVVGQDSETIELAPEYAEAIATRAGALAGISPMFQPCVVPPKPWTGITGGGYWANGRRPLALVRTHSKKGLMRYEDVYMPEVYKAINIAQNTAWSINKWVLAVANVITKWKHCPVRDIPAIEREELPMKPEDIDMNPEALTAWKRAKAAVYRRDKARKSRRILLEFMLEQANKFANHRAIWFPYNMDWRGRVYAVSMFNPQGNDMTKGLLTLAKGKPIGKEGYYWLKIHGANCAGVDKVPFPERIKFIEENHENIMACAKSPLENTWWAEQDSPFCFLAFCFEYAGVQHHGLSYNCSLPLAFDGSCSGIQHFSAMLRDEVGGRAVNLLPSETVQDIYGIVAKKVNEILQADAINGTDNEVVTVTDENTGEISEKVKLGTKALAGQWLAYGVTRSVTKRSVMTLAYGSKEFGFRQQVLRHTIQWAIDSGRGLMFTQPNQAAGYMAKLIWESVSVTVVAAVEAMNWLKSAAKLLAAEVKDKKTGEILRKRCAVHWVTPDGFPVWQEYKKPIQTRLNLMFLGQFRLQPTINTNKDSEIDAHKQESGIAPNFVHSQDGSHLRKTVVWAHEKYGIESFALIHDSFGTIPADAANLFKAVRETMVDTYESCDVLADFYDQFADQLHESQLDKMPALPAKGNLNLRDILESDFAFA

SEQ ID NO: 227 - DNA, 2670 bp, synthetic construct
  misc_feature 1..2670: note = Variant of RNA polymerase
  source 1..2670: mol_type = other DNA
atgcaccatcaccatcaccatatgaacacgattaacatcgctaagaacgacttctctgacatcgaactggctgctatcccgttcaacactctggctgaccattacggtgagcgtttagctcgcgaacagttggcccttgagcatgagtcttacgagatgggtgaagcacgtttccgcaagatgtttgagcgtcaacttaaagctggtgaggttgcggataacgctgccgccaagcctctcatcactaccctactccctaagatgattgcacgcatcaacgactggtttgaggaagtgaaagctaagcgcggcaagcgcccgacagccttccagttcctgcaagaaatcaagccggaagccgtagcgtacatcaccattaagaccactctggcttgcctaaccagtgcggaccgtacaaccgtacaggctgtagcaagcgcaatcggtcgggccattgaggacgaggctcgcttcggtcgtatccgtgaccttgaacgcaaggtattcaagaaaaactatgaggaacaactcaacaagcgcgtagggcacgtctacaagaaagcatttatgcaagttgtcgaggctgacatgctctctaagggtctactcggtggcgagtcgtggtcttcgtggcataaggaagactctattcatgtaggagtacgctgcatcgagatgctcattgagtcaaccggaatggttagcttacaccgccaaaatgctggcgtagtaggtcaagactctgagactatcgaactcgcacctgaatacgctgaggctatcgcaacccgtgcaggtgcgctggctggcatctctccgatgttccaaccttgcgtagttcctcctaagccgtggactggcattactggtggtggctattgggctaacggtcgtcgtcctctggcgctggtgcgtactcacagtaagaaaggtctgatgcgctacgaagacgtttacatgcctgaggtgtacaaagcgattaacattgcgcaaaacaccgcctggaagatcaacaagaaagtcctggcggtcgccaacgtaatcaccaagtggaagcattgtccggtccgggacatccctgcgattgagcgtgaagaactcccgatgaaaccggaagacatcgacatgaatcctgaggctctcactgcgtggaaacgtgctaaagctgctgtgtaccgcagagacaaggctcgcaagtctcgccgtatcttgcttgagttcatgcttgagcaagccaataagtttgctaaccatcgtgccatctggttcccttacaacatggactggcgcggtcgtgtttacgctgtgtcaatgttcaacccgcaaggtaacgatatgaccaaaggactgcttacgctggcgaaaggtaaaccaatcggtaaggaaggttactactggctgaaaatccacggtgcaaactgtgcgggtgtcgataaggttccgttccctgagcgcatcaagttcattgaggaaaaccacgagaacatcatggcttgcgctaagtctccactggagaacacttggtgggctgagcaagatagtccgttctgcttccttgcgttctgctttgagtacgctggggtacagcaccacggcctgagctataactgctcccttccgctggcgtttgacgggtcttgctctggcatccagcacttctccgcgatgctccgagatgaggtaggtggtcgcgcggttaacttgcttcctagtgaaaccgttcaggacatctacgggattgttgctaagaaagtcaacgagattctacaagcagacgcaatcaatgggaccgataacgaagtagttaccgtgaccgatgagaacactggtgaaatctctgagaaagtcaagctgggcactaaggcactggctggtcaatggctggcttacggtgttactcgcagtgtgactaagcgttcagtcatgacgctggcttacgggtccaaagagttcggcttccgtcaacaagtgctgcgccacactattcagtgggctattgattccggccgtggtctgatgttcactcagccgaatcaggctgctggatacatggctaagctgatttgggaatctgtgagcgtgacggtggtagctgcggttgaagcaatgaactggcttaagtctgctgctaagctgctggctgctgaggtcaaagataagaagactggagagattcttcgcaagcgttgcgctgtgcattgggtaactcctgatggtttccctgtgtggcaggaatacaagaagcctattcagacgcgcttgaacctgatgttcctcggtcagttccgcttacagcctaccattaacaccaacaaagatagcgagattgatgcacacaaacaggagtctggtatcgctcctaactttgtacacagccaagacggtagccaccttcgtaagactgtagtgtgggcacacgagaagtacggaatcgaatcttttgcactgattcacgactccttcggtaccattccggctgacgctgcgaacctgttcaaagcagtgcgcgaaactatggttgacacatatgagtcttgtgatgtactggctgatttctacgaccagttcgctgaccagttgcacgagtctcaattggacaaaatgccagcacttccggctaaaggtaacttgaacctccgtgacatcttagagtcggacttcgcgttcgcg

SEQ ID NO: 228 - protein, 890 aa, synthetic construct
  REGION 1..890: note = Variant of RNA polymerase
MHHHHHHMNTINIAKNDFSDIELAAIPFNTLADHYGERLAREQLALEHESYEMGEARFRKMFERQLKAGEVADNAAAKPLITTLLPKMIARINDWFEEVKAKRGKRPTAFQFLQEIKPEAVAYITIKTTLACLTSADRTTVQAVASAIGRAIEDEARFGRIRDLERKVFKKNYEEQLNKRVGHVYKKAFMQVVEADMLSKGLLGGESWSSWHKEDSIHVGVRCIEMLIESTGMVSLHRQNAGVVGQDSETIELAPEYAEAIATRAGALAGISPMFQPCVVPPKPWTGITGGGYWANGRRPLALVRTHSKKGLMRYEDVYMPEVYKAINIAQNTAWKINKKVLAVANVITKWKHCPVRDIPAIEREELPMKPEDIDMNPEALTAWKRAKAAVYRRDKARKSRRILLEFMLEQANKFANHRAIWFPYNMDWRGRVYAVSMFNPQGNDMTKGLLTLAKGKPIGKEGYYWLKIHGANCAGVDKVPFPERIKFIEENHENIMACAKSPLENTWWAEQDSPFCFLAFCFEYAGVQHHGLSYNCSLPLAFDGSCSGIQHFSAMLRDEVGGRAVNLLPSETVQDIYGIVAKKVNEILQADAINGTDNEVVTVTDENTGEISEKVKLGTKALAGQWLAYGVTRSVTKRSVMTLAYGSKEFGFRQQVLRHTIQWAIDSGRGLMFTQPNQAAGYMAKLIWESVSVTVVAAVEAMNWLKSAAKLLAAEVKDKKTGEILRKRCAVHWVTPDGFPVWQEYKKPIQTRLNLMFLGQFRLQPTINTNKDSEIDAHKQESGIAPNFVHSQDGSHLRKTVVWAHEKYGIESFALIHDSFGTIPADAANLFKAVRETMVDTYESCDVLADFYDQFADQLHESQLDKMPALPAKGNLNLRDILESDFAFA

SEQ ID NO: 229 - DNA, 2670 bp, synthetic construct
  misc_feature 1..2670: note = Variant of RNA polymerase
  source 1..2670: mol_type = other DNA
atgcaccatcaccatcaccatatgaacacgattaacatcgctaagaacgacttctctgacatcgaactggctgctatcccgttcaacactctggctgaccattacggtgagcgtttagctcgcgaacagttggcccttgagcatgagtcttacgagatgggtgaagcacgtttccgcaagatgtttgagcgtcaacttaaagctggtgaggttgcggataacgctgccgccaagcctctcatcactaccctactccctaagatgattgcacgcatcaacgactggtttgaggaagtgaaagctaagcgcggcaagcgcccgacagccttccagttcctgcaagaaatcaagccggaagccgtagcgtacatcaccattaagaccactctggcttgcctaaccagtgcggaccgtacaaccgttcaggctgtagcaagcgcaatcggtcgggccattgaggacgaggctcgcttcggtcgtatccgtgaccttgaagttaagcatttcaagaaaaactatgaggaacaactcaacaagcgcgtagggcacgtctacaagaaagcatttatgcaagttgtcgaggctgacatgctctctaagggtctactcggtggcgaggcgtggtcttcgtggcataaggaagactctattcatgtaggagtacgctgcatcgagatgctcattgagtcaaccggaatggttagcttacaccgccaaaatgctggcgtagtaggtcaagactctgagactatcgaactcgcacctgaatacgctgaggctatcgcaacccgtgcaggtgcgctggctggcatctctccgatgttccaaccttgcgtagttcctcctaagccgtggactggcattactggtggtggctattgggctaacggtcgtcgtcctctggcgctggtgcgtactcacagtaagaaaggtctgatgcgctacgaagacgtttacatgcctgaggtgtacaaagcgattaacattgcgcaaaacaccgcctggtcgatcaacaagaaagtcctggcggtcgccaacgtaatcaccaagtggaagcattgtccggtccgggacatccctgcgattgagcgtgaagaactcccgatgaaaccggaagacatcgacatgaatcctgaggctctcaccgcgtggaaacgtgctaaagctgctgtgtaccgcagagacaaggctcgcaagtctcgccgtatcttgcttgagttcatgcttgagcaagccaataagtttgctaaccataaggccatctggttcccttacaacatggactggcgcggtcgtgtttacgctgtgtcaatgttcaacccgcaaggtaacgatatgaccaaaggactgcttacgctggcgaaaggtaaaccaatcggtaaggaaggttactactggctgaaaatccacggtgcaaactgtgcgggtgtcgataaggttccgttccctgagcgcatcaagttcattgaggaaaaccacgagaacatcatggcttgcgctaagtctccactggagaacacttggtgggctgagcaagatagtccgttctgcttccttgcgttctgctttgagtacgctggggtacagcaccacggcctgagctataactgctcccttccgctggcgtttgacgggtcttgctctggcatccagcacttctccgcgatgctccgagatgaggtaggtggtcgcgcggttaacttgcttcctagtgaaaccgttcaggacatctacgggattgttgctaagaaagtcaacgagattctacaagcagacgcaatcaatgggaccgataacgaagtagttaccgtgaccgatgagaacactggtgaaatctctgagaaagtcaagctgggcactaaggcactggctggtcaatggctggcttacggtgttactcgcagtgtgactaagcgttcagtcatgacgctggcttacgggtccaaagagttcggcttccgtcaacaagtgctgcgccacactattcagtgggctattgattccggcaaaggtctgatgttcactcagccgaatcaggctgctggatacatggctaagctgatttgggaatctgtgagcgtgacggtggtagctgcggttgaagcaatgaactggcttaagtctgctgctaagctgctggctgctgaggtcaaagataagaagactggagagattcttcgcaagcgttgcgctgtgcattgggtaactcctgatggtttccctgtgtggcaggaatacaagaagcctattcagacgcgcttgaacctgatgttcctcggtcagttccgcttacagcctaccattaacaccaacaaagatagcgagattgatgcacacaaacaggagtctggtatcgctcctaactttgtacacagccaagacggtagccaccttcgtaagactgtagtgtgggcacacgagaagtacggaatcgaatcttttgcactgattcacgactccttcggtaccattccggctgacgctgcgaacctgttcaaagcagtgcgcgaaactatggttgacacatatgagtcttgtgatgtactggctgatttctacgaccagttcgctgaccagttgcacgagtctcaattggacaaaatgccagcacttccggctaaaggtaacttgaacctccgtgacatcttagagtcggacttcgcgttcgcg

SEQ ID NO: 230 - protein, 890 aa, synthetic construct
  REGION 1..890: note = Variant of RNA polymerase
MHHHHHHMNTINIAKNDFSDIELAAIPFNTLADHYGERLAREQLALEHESYEMGEARFRKMFERQLKAGEVADNAAAKPLITTLLPKMIARINDWFEEVKAKRGKRPTAFQFLQEIKPEAVAYITIKTTLACLTSADRTTVQAVASAIGRAIEDEARFGRIRDLEVKHFKKNYEEQLNKRVGHVYKKAFMQVVEADMLSKGLLGGEAWSSWHKEDSIHVGVRCIEMLIESTGMVSLHRQNAGVVGQDSETIELAPEYAEAIATRAGALAGISPMFQPCVVPPKPWTGITGGGYWANGRRPLALVRTHSKKGLMRYEDVYMPEVYKAINIAQNTAWSINKKVLAVANVITKWKHCPVRDIPAIEREELPMKPEDIDMNPEALTAWKRAKAAVYRRDKARKSRRILLEFMLEQANKFANHKAIWFPYNMDWRGRVYAVSMFNPQGNDMTKGLLTLAKGKPIGKEGYYWLKIHGANCAGVDKVPFPERIKFIEENHENIMACAKSPLENTWWAEQDSPFCFLAFCFEYAGVQHHGLSYNCSLPLAFDGSCSGIQHFSAMLRDEVGGRAVNLLPSETVQDIYGIVAKKVNEILQADAINGTDNEVVTVTDENTGEISEKVKLGTKALAGQWLAYGVTRSVTKRSVMTLAYGSKEFGFRQQVLRHTIQWAIDSGKGLMFTQPNQAAGYMAKLIWESVSVTVVAAVEAMNWLKSAAKLLAAEVKDKKTGEILRKRCAVHWVTPDGFPVWQEYKKPIQTRLNLMFLGQFRLQPTINTNKDSEIDAHKQESGIAPNFVHSQDGSHLRKTVVWAHEKYGIESFALIHDSFGTIPADAANLFKAVRETMVDTYESCDVLADFYDQFADQLHESQLDKMPALPAKGNLNLRDILESDFAFA

SEQ ID NO: 231 - DNA, 2670 bp, synthetic construct
  misc_feature 1..2670: note = Variant of RNA polymerase
  source 1..2670: mol_type = other DNA
atgcaccatcaccatcaccatatgaacacgattaacatcgctaagaacgacttctctgacatcgaactggctgctatcccgttcaacactctggctgaccattacggtgagcgtttagctcgcgaacagttggcccttgagcatgagtcttacgagatgggtgaagcacgtttccgcaagatgtttgagcgtcaacttaaagctggtgaggttgcggataacgctgccgccaagcctctcatcactaccctactccctaagatgattgcacgcatcaacgactggtttgaggaagtgaaagctaagcgcggcaagcgcccgacagccttccagttcctgcaagaaatcaagccggaagccgtagcgtacatcaccattaagaccactctggcttgcctaaccagtgcggaccgtacaaccgtacaggctgtagcaagcgcaatcggtcgggccattgaggacgaggctcgcttcggtcgtatccgtgaccttgaagctaagcacttcaagaaaaactatgaggaacaactcaacaagcgcgtagggcacgtctacaagaaagcatttatgcaagttgtcgaggctgacatgctctctaagggtctactcggtggcgagtcgtggtcttcgtggcataaggaagactctattcatgtaggagtacgctgcatcgagatgctcattgagtcaaccggaatggttagcttacaccgccaaaatgctggcgtagtaggtcaagactctgagactatcgaactcgcacctgaatacgctgaggctatcgcaacccgtgcaggtgcgctggctggcatctctccgatgttccaaccttgcgtagttcctcctaagccgtggactggcattactggtggtggctattgggctaacggtcgtcgtcctctggcgctggtgcgtactcacagtaagaaaggtctgatgcgctacgaagacgtttacatgcctgaggtgtacaaagcgattaacattgcgcaaaacaccgcctggaagatcaacaagaaagtcctggcggtcgccaacgtaatcaccaagtggaagcattgtccggtccgggacatccctgcgattgagcgtgaagaactcccgatgaaaccggaagacatcgacatgaatcctgaggctctcaccgcgtggaaacgtgctaaagctgctgtgtaccgcagagacaaggctcgcaagtctcgccgtatcttgcttgagttcatgcttgagcaagccaataagtttgctaaccataaggccatctggttcccttacaacatggactggcgcggtcgtgtttacgctgtgtcaatgttcaacccgcaaggtaacgatatgaccaaaggactgcttacgctggcgaaaggtaaaccaatcggtaaggaaggttactactggctgaaaatccacggtgcaaactgtgcgggtgtcgataaggttccgttccctgagcgcatcaagttcattgaggaaaaccacgagaacatcatggcttgcgctaagtctccactggagaacacttggtgggctgagcaagatagtccgttctgcttccttgcgttctgctttgagtacgctggggtacagcaccacggcctgagctataactgctcccttccgctggcgtttgacgggtcttgctctggcatccagcacttctccgcgatgctccgagatgaggtaggtggtcgcgcggttaacttgcttcctagtgaaaccgttcaggacatctacgggattgttgctaagaaagtcaacgagattctacaagcagacgcaatcaatgggaccgataacgaagtagttaccgtgaccgatgagaacactggtgaaatctctgagaaagtcaagctgggcactaaggcactggctggtcaatggctggcttacggtgttactcgcagtgtgactaagcgttcagtcatgacgctggcttacgggtccaaagagttcggcttccgtcaacaagtgctgcgccacactattcagtgggctattgattccggccgtggtctgatgttcactcagccgaatcaggctgctggatacatggctaagctgatttgggaatctgtgagcgtgacggtggtagctgcggttgaagcaatgaactggcttaagtctgctgctaagctgctggctgctgaggtcaaagataagaagactggagagattcttcgcaagcgttgcgctgtgcattgggtaactcctgatggtttccctgtgtggcaggaatacaagaagcctattcagacgcgcttgaacctgatgttcctcggtcagttccgcttacagcctaccattaacaccaacaaagatagcgagattgatgcacacaaacaggagtctggtatcgctcctaactttgtacacagccaagacggtagccaccttcgtaagactgtagtgtgggcacacgagaagtacggaatcgaatcttttgcactgattcacgactccttcggtaccattccggctgacgctgcgaacctgttcaaagcagtgcgcgaaactatggttgacacatatgagtcttgtgatgtactggctgatttctacgaccagttcgctgaccagttgcacgagtctcaattggacaaaatgccagcacttccggctaaaggtaacttgaacctccgtgacatcttagagtcggacttcgcgttcgcg

SEQ ID NO: 232 - protein, 890 aa, synthetic construct
  REGION 1..890: note = Variant of RNA polymerase
MHHHHHHMNTINIAKNDFSDIELAAIPFNTLADHYGERLAREQLALEHESYEMGEARFRKMFERQLKAGEVADNAAAKPLITTLLPKMIARINDWFEEVKAKRGKRPTAFQFLQEIKPEAVAYITIKTTLACLTSADRTTVQAVASAIGRAIEDEARFGRIRDLEAKHFKKNYEEQLNKRVGHVYKKAFMQVVEADMLSKGLLGGESWSSWHKEDSIHVGVRCIEMLIESTGMVSLHRQNAGVVGQDSETIELAPEYAEAIATRAGALAGISPMFQPCVVPPKPWTGITGGGYWANGRRPLALVRTHSKKGLMRYEDVYMPEVYKAINIAQNTAWKINKKVLAVANVITKWKHCPVRDIPAIEREELPMKPEDIDMNPEALTAWKRAKAAVYRRDKARKSRRILLEFMLEQANKFANHKAIWFPYNMDWRGRVYAVSMFNPQGNDMTKGLLTLAKGKPIGKEGYYWLKIHGANCAGVDKVPFPERIKFIEENHENIMACAKSPLENTWWAEQDSPFCFLAFCFEYAGVQHHGLSYNCSLPLAFDGSCSGIQHFSAMLRDEVGGRAVNLLPSETVQDIYGIVAKKVNEILQADAINGTDNEVVTVTDENTGEISEKVKLGTKALAGQWLAYGVTRSVTKRSVMTLAYGSKEFGFRQQVLRHTIQWAIDSGRGLMFTQPNQAAGYMAKLIWESVSVTVVAAVEAMNWLKSAAKLLAAEVKDKKTGEILRKRCAVHWVTPDGFPVWQEYKKPIQTRLNLMFLGQFRLQPTINTNKDSEIDAHKQESGIAPNFVHSQDGSHLRKTVVWAHEKYGIESFALIHDSFGTIPADAANLFKAVRETMVDTYESCDVLADFYDQFADQLHESQLDKMPALPAKGNLNLRDILESDFAFA

SEQ ID NO: 233 - DNA, 2670 bp, synthetic construct
  misc_feature 1..2670: note = Variant of RNA polymerase
  source 1..2670: mol_type = other DNA
atgcaccatcaccatcaccatatgaacacgattaacatcgctaagaacgacttctctgacatcgaactggctgctatcccgttcaacactctggctgaccattacggtgagggcttagctcgcgaacagttggcccttgagcatgagtcttacgagatgggtgaagcacgtttccgcaagatgtttgagcgtcaacttaaagctggtgaggttgcggataacgctgccgccaagcctctcatcactaccctactccctaagatgattgcacgcatcaacgactggtttgaggaagtgaaagctaagcgcggcaagcgcccgacagccttccagttcctgcaagaaatcaagccggaagccgtagcgtacatcaccattaagaccactctggcttgcctaaccagtgcggaccgtacaaccgttcaggctgtagcaagcgcaatcggtcgggccattgaggacgaggctcgcttcggtcgtatccgtgaccttgaagctaagcacttcaagaaaaactatgaggaacaactcaacaagcgcgtagggcacgtctacaagaaagcatttatgcaagttgtcgaggctgacatgctctctaagggtctactcggtggcgaggcgtggtcttcgtggcataaggaagactctattcatgtaggagtacgctgcatcgagatgctcattgagtcaaccggaatggttagcttacaccgccaaaatgctggcgtagtaggtcaagactctgagactatcgaactcgcacctgaatacgctgaggctatcgcaacccgtgcaggtgcgctggctggcatctctccgatgttccaaccttgcgtagttcctcctaagccgtggactggcattactggtggtggctattgggctaacggtcgtcgtcctctggcgctggtgcgtactcacagtaagaaaggtctgatgcgctacgaagacgtttacatgcctgaggtgtacaaagcgattaacattgcgcaaaacaccgcctggtcgatcaacaagtgggtcctggcggtcgccaacgtaatcaccaagtggaagcattgtccggtccgggacatccctgcgattgagcgtgaagaactcccgatgaaaccggaagacatcgacatgaatcctgaggctctcaccgcgtggaaacgtgctaaagctgctgtgtaccgcagagacaaggctcgcaagtctcgccgtatcttgcttgagttcatgcttgagcaagccaataagtttgctaaccataaggccatctggttcccttacaacatggactggcgcggtcgtgtttacgctgtgccgatgttcaacccgcaaggtaacgatatgaccaaaggactgcttacgctggcgaaaggtaaaccaatcggtaaggaaggttactactggctgaaaatccacggtgcaaactgtgcgggtgtcgataaggttccgttccctgagcgcatcaagttcattgaggaaaaccacgagaacatcatggcttgcgctaagtctccactggagaacacttggtgggctgagcaagatagtccgttctgcttccttgcgttctgctttgagtacgctggggtacagcaccacggcctgagctataactgctcccttccgctggcgtttgacgggtcttgctctggcatccagcacttctccgcgatgctccgagatgaggtaggtggtcgcgcggttaacttgcttcctagtgaaaccgttcaggacatctacgggattgttgctaagaaagtcaacgagattctacaagcagacgcaatcaatgggaccgataacgaagtagttaccgtgaccgatgagaacactggtgaaatctctgagaaagtcaagctgggcactaaggcactggctggtcaatggctggcttacggtgttactcgcagtgtgactaagcgttcagtcatgacgctggcttacgggtccaaagagttcggcttccgtcaacaagtgctgcgccacactattcagtgggctattgattccggcaagggtctgatgttcactcagccgaatcaggctgctggatacatggctaagctgatttgggaatctgtgagcgtgacggtggtagctgcggttgaagcaatgaactggcttaagtctgctgctaagctgctggctgctgaggtcaaagataagaagactggagagattcttcgcaagcgttgcgctgtgcattgggtaactcctgatggtttccctgtgtggcaggaatacaagaagcctattcagacgcgcttgaacctgatgttcctcggtcagttccgcttacagcctaccattaacaccaacaaagatagcgagattgatgcacgtaaacaggagtctggtatcgctcctaactttgtacacagccaagacggtagccaccttcgtaagactgtagtgtgggcacacgagaagtacggaatcgaatcttttgcactgattcacgactccttcggtaccattccggctgacgctgcgaacctgttcaaagcagtgcgcgaaactatggttgacacatatgagtcttgtgatgtactggctgatttctacgaccagttcgctgaccagttgcacgagtctcaattggacaaaatgccagcacttccggctaaaggtaacttgaacctccgtgacatcttagagtcggacttcgcgttcgcg

SEQ ID NO: 234 - protein, 890 aa, synthetic construct
  REGION 1..890: note = Variant of RNA polymerase
MHHHHHHMNTINIAKNDFSDIELAAIPFNTLADHYGEGLAREQLALEHESYEMGEARFRKMFERQLKAGEVADNAAAKPLITTLLPKMIARINDWFEEVKAKRGKRPTAFQFLQEIKPEAVAYITIKTTLACLTSADRTTVQAVASAIGRAIEDEARFGRIRDLEAKHFKKNYEEQLNKRVGHVYKKAFMQVVEADMLSKGLLGGEAWSSWHKEDSIHVGVRCIEMLIESTGMVSLHRQNAGVVGQDSETIELAPEYAEAIATRAGALAGISPMFQPCVVPPKPWTGITGGGYWANGRRPLALVRTHSKKGLMRYEDVYMPEVYKAINIAQNTAWSINKWVLAVANVITKWKHCPVRDIPAIEREELPMKPEDIDMNPEALTAWKRAKAAVYRRDKARKSRRILLEFMLEQANKFANHKAIWFPYNMDWRGRVYAVPMFNPQGNDMTKGLLTLAKGKPIGKEGYYWLKIHGANCAGVDKVPFPERIKFIEENHENIMACAKSPLENTWWAEQDSPFCFLAFCFEYAGVQHHGLSYNCSLPLAFDGSCSGIQHFSAMLRDEVGGRAVNLLPSETVQDIYGIVAKKVNEILQADAINGTDNEVVTVTDENTGEISEKVKLGTKALAGQWLAYGVTRSVTKRSVMTLAYGSKEFGFRQQVLRHTIQWAIDSGKGLMFTQPNQAAGYMAKLIWESVSVTVVAAVEAMNWLKSAAKLLAAEVKDKKTGEILRKRCAVHWVTPDGFPVWQEYKKPIQTRLNLMFLGQFRLQPTINTNKDSEIDARKQESGIAPNFVHSQDGSHLRKTVVWAHEKYGIESFALIHDSFGTIPADAANLFKAVRETMVDTYESCDVLADFYDQFADQLHESQLDKMPALPAKGNLNLRDILESDFAFA

SEQ ID NO: 235 - DNA, 2670 bp, synthetic construct
  misc_feature 1..2670: note = Variant of RNA polymerase
  source 1..2670: mol_type = other DNA
atgcaccatcaccatcaccatatgaacacgattaacatcgctaagaacgacttctctgacatcgaactggctgctatcccgttcaacactctggctgaccattacggtgagggcttagctcgcgaacagttggcccttgagcatgagtcttacgagatgggtgaagcacgtttccgcaagatgtttgagcgtcaacttaaagctggtgaggttgcggataacgctgccgccaagcctctcatcactaccctactccctaagatgattgcacgcatcaacgactggtttgaggaagtgaaagctaagcgcggcaagcgcccgacagccttccagttcctgcaagaaatcaagccggaagccgtagcgtacatcaccattaagaccactctggcttgcctaaccagtgcggaccgtacaaccgttcaggctgtagcaagcgcaatcggtcgggccattgaggacgaggctcgcttcggtcgtatccgtgaccttgaagctaagcacttcaagaaaaactatgaggaacaactcaacaagcgcgtagggcacgtctacaagaaagcatttatgcaagttgtcgaggctgacatgctctctaagggtctactcggtggcgaggcgtggtcttcgtggcataaggaagactctattcatgtaggagtacgctgcatcgagatgctcattgagtcaaccggaatggttagcttacaccgccaaaatgctggcgtagtaggtcaagactctgagactatcgaactcgcacctgaatacgctgaggctatcgcaacccgtgcaggtgcgctggctggcatctctccgatgttccaaccttgcgtagttcctcctaagccgtggactggcattactggtggtggctattgggctaacggtcgtcgtcctctggcgctggtgcgtactcacagtaagaaaggtctgatgcgctacgaagacgtttacatgcctgaggtgtacaaagcgattaacattgcgcaaaacaccgcctggtcgatcaacaagtgggtcctggcggtcgccaacgtaatcaccaagtggaagcattgtccggtccgggacatccctgcgattgagcgtgaagaactcccgatgaaaccggaagacatcgacatgaatcctgaagctctcaccgcgtggaaacgtgctaaagctgctgtgtaccgcagagacaaggctcgcaagtctcgccgtatcttgcttgagttcatgcttgagcaagccaataagtttgctaaccataaggccatctggttcccttacaacatggactggcgcggtcgtgtttacgctgtgccgatgttcaacccgcaaggtaacgatatgaccaaaggactgcttacgctggcgaaaggtaaaccaatcggtaaggaaggttactactggctgaaaatccacggtgcaaactgtgcgggtgtcgataaggttccgttccctgagcgcatcaagttcattgaggaaaaccacgagaacatcatggcttgcgctaagtctccactggagaacacttggtgggctgagcaagatagtccgttctgcttccttgcgttctgctttgagtacgctggggtacagcaccacggcctgagctataactgctcccttccgctggcgtttgacgggtcttgctctggcatccagcacttctccgcgatgctccgagatgaggtaggtggtcgcgcggttaacttgcttcctagtgaaaccgttcaggacatctacgggattgttgctaagaaagtcaacgagattctacaagcagacgcaatcaatgggaccgataacgaagtagttaccgtgaccgatgagaacactggtgaaatctctgagaaagtcaagctgggcactaaggcactggctggtcaatggctggcttacggtgttactcgcagtgtgactaagcgttcagtcatgacgctggcttacgggtccaaagagttcggcttccgtcaacaagtgctgcgccacactattcagtgggctattgattccggcaaaggtctgatgttcactcagccgaatcaggctgctggatacatggctaagctgatttgggaatctgtgagcgtgacggtggtagctgcggttgaagcaatgaactggcttaagtctgctgctaagctgctggctgctgaggtcaaagataagaagactggagagattcttcgcaagcgttgcgctgtgcattgggtaactcctgatggtttccctgtgtggcaggaatacaagaagcctattcagacgcgcttgaacctgatgttcctcggtcagttccgcttacagcctaccattaacaccaacaaagatagcgagattgatgcacataaacaggagtctggtatcgctcctaactttgtacacagccaagacggtagccaccttcgtaagactgtagtgtgggcacacgagaagtacggaatcgaatcttttgcactgattcacgactccttcggtaccattccggctgacgctgcgaacctgttcaaagcagtgcgcgaaactatggttgacacatatgagtcttgtgatgtactggctgatttctacgaccagttcgctgaccagttgcacgagtctcaattggacaaaatgccagcacttccggctaaaggtaacttgaacctccgtgacatcttagagtcggacttcgcgttcgcg

SEQ ID NO: 236 - protein, 890 aa, synthetic construct
  REGION 1..890: note = Variant of RNA polymerase
MHHHHHHMNTINIAKNDFSDIELAAIPFNTLADHYGEGLAREQLALEHESYEMGEARFRKMFERQLKAGEVADNAAAKPLITTLLPKMIARINDWFEEVKAKRGKRPTAFQFLQEIKPEAVAYITIKTTLACLTSADRTTVQAVASAIGRAIEDEARFGRIRDLEAKHFKKNYEEQLNKRVGHVYKKAFMQVVEADMLSKGLLGGEAWSSWHKEDSIHVGVRCIEMLIESTGMVSLHRQNAGVVGQDSETIELAPEYAEAIATRAGALAGISPMFQPCVVPPKPWTGITGGGYWANGRRPLALVRTHSKKGLMRYEDVYMPEVYKAINIAQNTAWSINKWVLAVANVITKWKHCPVRDIPAIEREELPMKPEDIDMNPEALTAWKRAKAAVYRRDKARKSRRILLEFMLEQANKFANHKAIWFPYNMDWRGRVYAVPMFNPQGNDMTKGLLTLAKGKPIGKEGYYWLKIHGANCAGVDKVPFPERIKFIEENHENIMACAKSPLENTWWAEQDSPFCFLAFCFEYAGVQHHGLSYNCSLPLAFDGSCSGIQHFSAMLRDEVGGRAVNLLPSETVQDIYGIVAKKVNEILQADAINGTDNEVVTVTDENTGEISEKVKLGTKALAGQWLAYGVTRSVTKRSVMTLAYGSKEFGFRQQVLRHTIQWAIDSGKGLMFTQPNQAAGYMAKLIWESVSVTVVAAVEAMNWLKSAAKLLAAEVKDKKTGEILRKRCAVHWVTPDGFPVWQEYKKPIQTRLNLMFLGQFRLQPTINTNKDSEIDAHKQESGIAPNFVHSQDGSHLRKTVVWAHEKYGIESFALIHDSFGTIPADAANLFKAVRETMVDTYESCDVLADFYDQFADQLHESQLDKMPALPAKGNLNLRDILESDFAFA

SEQ ID NO: 237 - DNA, 2670 bp, synthetic construct
  misc_feature 1..2670: note = Variant of RNA polymerase
  source 1..2670: mol_type = other DNA
atgcaccatcaccatcaccatatgaacacgattaacatcgctaagaacgacttctctgacatcgaactggctgctatcccgttcaacactctggctgaccattacggtgagggcttagctcgcgaacagttggcccttgagcatgagtcttacgagatgggtgaagcacgtttccgcaagatgtttgagcgtcaacttaaagctggtgaggttgcggataacgctgccgccaagcctctcatcactaccctactccctaagatgattgcacgcatcaacgactggtttgaggaagtgaaagctaagcgcggcaagcgcccgacagccttccagttcctgcaagaaatcaagccggaagccgtagcgtacatcaccattaagaccactctggcttgcctaaccagtgcggaccgtacaaccgttcaggctgtagcaagcgcaatcggtcgggccattgaggacgaggctcgcttcggtcgtatccgtgaccttgaagctaagcacttcaagaaaaactatgaggaacaactcaacaagcgcgtagggcacgtctacaagaaagcatttatgcaagttgtcgaggctgacatgctctctaagggtctactcggtggcgaggcgtggtcttcgtggcataaggaagactctattcatgtaggagtacgctgcatcgagatgctcattgagtcaaccggaatggttagcttacaccgccaaaatgctggcgtagtaggtcaagactctgagactatcgaactcgcacctgaatacgctgaggctatcgcaacccgtgcaggtgcgctggctggcatctctccgatgttccaaccttgcgtagttcctcctaagccgtggactggcattactggtggtggctattgggctaacggtcgtcgtcctctggcgctggtgcgtactcacagtaagaaaggtctgatgcgctacgaagacgtttacatgcctgaggtgtacaaagcgattaacattgcgcaaaacaccgcctggtcgatcaacaagtgggtcctggcggtcgccaacgtaatcaccaagtggaagcattgtccggtccgggacatccctgcgattgagcgtgaagaactcccgatgaaaccggaagacatcgacatgaatcctgaggctctcaccgcgtggaaacgtgctaaagctgctgtgtaccgcagagacaaggctcgcaagtctcgtcgtatcctgcttgagttcatgcttgagcaagccaataagtttgctaaccataaggccatctggttcccttacaacatggactggcgcggtcgtgtttacgctgtgtcaatgttcaacccgcaaggtaacgatatgaccaaaggactgcttacgctggcgaaaggtaaaccaatcggtaaggaaggttactactggctgaaaatccacggtgcaaactgtgcgggtgtcgataaggttccgttccctgagcgcatcaagttcattgaggaaaaccacgagaacatcatggcttgcgctaagtctccactggagaacacttggtgggctgagcaagatagtccgttctgcttccttgcgttctgctttgagtacgctggggtacagcaccacggcctgagctataactgctcccttccgctggcgtttgacgggtcttgctctggcatccagcacttctccgcgatgctccgagatgaggtaggtggtcgcgcggttaacttgcttcctagtgaaaccgttcaggacatctacgggattgttgctaagaaagtcaacgagattctacaagcagacgcaatcaatgggaccgataacgaagtagttaccgtgaccgatgagaacactggtgaaatctctgagaaagtcaagctgggcactaaggcactggctggtcaatggctggcttacggtgttactcgcagtgtgactaagcgttcagtcatgacgctggcttacgggtccaaagagttcggcttccgtcaacaagtgctgcgccacactattcagtgggctattgattccggcaagggtctgatgttcactcagccgaatcaggctgctggatacatggctaagctgatttgggaatctgtgagcgtgacggtggtagctgcggttgaagcaatgaactggcttaagtctgctgctaagctgctggctgctgaggtcaaagataagaagactggagagattcttcgcaagcgttgcgctgtgcattgggtaactcctgatggtttccctgtgtggcaggaatacaagaagcctattcagacgcgcttgaacctgatgttcctcggtcagttccgcttacagcctaccattaacaccaacaaagatagcgagattgatgcacataaacaggagtctggtatcgctcctaactttgtacacagccaagacggtagccaccttcgtaagactgtagtgtgggcacacgagaagtacggaatcgaatcttttgcactgattcacgactccttcggtaccattccggctgacgctgcgaacctgttcaaagcagtgcgcgaaactatggttgacacatatgagtcttgtgatgtactggctgatttctacgaccagttcgctgaccagttgcacgagtctcaattggacaaaatgccagcacttccggctaaaggtaacttgaacctccgtgacatcttagagtcggacttcgcgttcgcg

SEQ ID NO: 238 - protein, 890 aa, synthetic construct
  REGION 1..890: note = Variant of RNA polymerase
MHHHHHHMNTINIAKNDFSDIELAAIPFNTLADHYGEGLAREQLALEHESYEMGEARFRKMFERQLKAGEVADNAAAKPLITTLLPKMIARINDWFEEVKAKRGKRPTAFQFLQEIKPEAVAYITIKTTLACLTSADRTTVQAVASAIGRAIEDEARFGRIRDLEAKHFKKNYEEQLNKRVGHVYKKAFMQVVEADMLSKGLLGGEAWSSWHKEDSIHVGVRCIEMLIESTGMVSLHRQNAGVVGQDSETIELAPEYAEAIATRAGALAGISPMFQPCVVPPKPWTGITGGGYWANGRRPLALVRTHSKKGLMRYEDVYMPEVYKAINIAQNTAWSINKWVLAVANVITKWKHCPVRDIPAIEREELPMKPEDIDMNPEALTAWKRAKAAVYRRDKARKSRRILLEFMLEQANKFANHKAIWFPYNMDWRGRVYAVSMFNPQGNDMTKGLLTLAKGKPIGKEGYYWLKIHGANCAGVDKVPFPERIKFIEENHENIMACAKSPLENTWWAEQDSPFCFLAFCFEYAGVQHHGLSYNCSLPLAFDGSCSGIQHFSAMLRDEVGGRAVNLLPSETVQDIYGIVAKKVNEILQADAINGTDNEVVTVTDENTGEISEKVKLGTKALAGQWLAYGVTRSVTKRSVMTLAYGSKEFGFRQQVLRHTIQWAIDSGKGLMFTQPNQAAGYMAKLIWESVSVTVVAAVEAMNWLKSAAKLLAAEVKDKKTGEILRKRCAVHWVTPDGFPVWQEYKKPIQTRLNLMFLGQFRLQPTINTNKDSEIDAHKQESGIAPNFVHSQDGSHLRKTVVWAHEKYGIESFALIHDSFGTIPADAANLFKAVRETMVDTYESCDVLADFYDQFADQLHESQLDKMPALPAKGNLNLRDILESDFAFA

SEQ ID NO: 239 - DNA, 2670 bp, synthetic construct
  misc_feature 1..2670: note = Variant of RNA polymerase
  source 1..2670: mol_type = other DNA
atgcaccatcaccatcaccatatgaacacgattaacatcgctaagaacgacttctctgacatcgaactggctgctatcccgttcaacactctggctgaccattacggtgagggcttagctcgcgaacagttggcccttgagcatgagtcttacgagatgggtgaagcacgtttccgcaagatgtttgagcgtcaacttaaagctggtgaggttgcggataacgctgccgccaagcctctcatcactaccctactccctaagatgattgcacgcatcaacgactggtttgaggaagtgaaagctaagcgcggcaagcgcccgacagccttccagttcctgcaagaaatcaagccggaagccgtagcgtacatcaccattaagaccactctggcttgcctaaccagtgcggaccgtacaaccgttcaggctgtagcaagcgcaatcggtcgggccattgaggacgaggctcgcttcggtcgtatccgtgaccttgaagctaagcacttcaagaaaaactatgaggaacaactcaacaagcgcgtagggcacgtctacaagaaagcatttatgcaagttgtcgaggctgacatgctctctaagggtctactcggtggcgagtcgtggtcttcgtggcataaggaagactctattcatgtaggagtacgctgcatcgagatgctcattgagtcaaccggaatggttagcttacaccgccaaaatgctggcgtagtaggtcaagactctgagactatcgaactcgcacctgaatacgctgaggctatcgcaacccgtgcaggtgcgctggctggcatctctccgatgttccaaccttgcgtagttcctcctaagccgtggactggcattactggtggtggctattgggctaacggtcgtcgtcctctggcgctggtgcgtactcacagtaagaaaggtctgatgcgctacgaagacgtttacatgcctgaggtgtacaaagcgattaacattgcgcaaaacaccgcctggtcgatcaacaagtgggtcctggcggtcgccaacgtaatcaccaagtggaagcattgtccggtccgggacatccctgcgattgagcgtgaagaactcccgatgaaaccggaagacatcgacatgaatcctgaagctctcaccgcgtggaaacgtgctaaagctgctgtgtaccgcagagacaaggctcgcaagtctcgtcgtatcctgcttgagttcatgcttgagcaagccaataagtttgctaaccataaggccatctggttcccttacaacatggactggcgcggtcgtgtttacgctgtgccgatgttcaacccgcaaggtaacgatatgaccaaaggactgcttacgctggcgaaaggtaaaccaatcggtaaggaaggttactactggctgaaaatccacggtgcaaactgtgcgggtgtcgataaggttccgttccctgagcgcatcaagttcattgaggaaaaccacgagaacatcatggcttgcgctaagtctccactggagaacacttggtgggctgagcaagatagtccgttctgcttccttgcgttctgctttgagtacgctggggtacagcaccacggcctgagctataactgctcccttccgctggcgtttgacgggtcttgctctggcatccagcacttctccgcgatgctccgagatgaggtaggtggtcgcgcggttaacttgcttcctagtgaaaccgttcaggacatctacgggattgttgctaagaaagtcaacgagattctacaagcagacgcaatcaatgggaccgataacgaagtagttaccgtgaccgatgaaaacactggtgaaatctctgagaaagtcaagctgggcactaaggcactggctggtcaatggctggcttacggtgttactcgcagtgtgactaagcgttcagtcatgacgctggcttacgggtccaaagagttcggcttccgtcaacaagtgctgcgccacactattcagtgggctattgattccggcaaaggtctgatgttcactcagccgaatcaggctgctggatacatggctaagctgatttgggaatctgtgagcgtgacggtggtagctgcggttgaagcaatgaactggcttaagtctgctgctaagctgctggctgctgaggtcaaagataagaagactggagagattcttcgcaagcgttgcgctgtgcattgggtaactcctgatggtttccctgtgtggcaggaatacaagaagcctattcagacgcgcttgaacctgatgttcctcggtcagttccgcttacagcctaccattaacaccaacaaagatagcgagattgatgcacgtaaacaggagtctggtatcgctcctaactttgtacacagccaagacggtagccaccttcgtaagactgtagtgtgggcacacgagaagtacggaatcgaatcttttgcactgattcacgactccttcggtaccattccggctgacgctgcgaacctgttcaaagcagtgcgcgaaactatggttgacacatatgagtcttgtgatgtactggctgatttctacgaccagttcgctgaccagttgcacgagtctcaattggacaaaatgccagcacttccggctaaaggtaacttgaacctccgtgacatcttagagtcggacttcgcgttcgcg

SEQ ID NO: 240 - protein, 890 aa, synthetic construct
  REGION 1..890: note = Variant of RNA polymerase
MHHHHHHMNTINIAKNDFSDIELAAIPFNTLADHYGEGLAREQLALEHESYEMGEARFRKMFERQLKAGEVADNAAAKPLITTLLPKMIARINDWFEEVKAKRGKRPTAFQFLQEIKPEAVAYITIKTTLACLTSADRTTVQAVASAIGRAIEDEARFGRIRDLEAKHFKKNYEEQLNKRVGHVYKKAFMQVVEADMLSKGLLGGESWSSWHKEDSIHVGVRCIEMLIESTGMVSLHRQNAGVVGQDSETIELAPEYAEAIATRAGALAGISPMFQPCVVPPKPWTGITGGGYWANGRRPLALVRTHSKKGLMRYEDVYMPEVYKAINIAQNTAWSINKWVLAVANVITKWKHCPVRDIPAIEREELPMKPEDIDMNPEALTAWKRAKAAVYRRDKARKSRRILLEFMLEQANKFANHKAIWFPYNMDWRGRVYAVPMFNPQGNDMTKGLLTLAKGKPIGKEGYYWLKIHGANCAGVDKVPFPERIKFIEENHENIMACAKSPLENTWWAEQDSPFCFLAFCFEYAGVQHHGLSYNCSLPLAFDGSCSGIQHFSAMLRDEVGGRAVNLLPSETVQDIYGIVAKKVNEILQADAINGTDNEVVTVTDENTGEISEKVKLGTKALAGQWLAYGVTRSVTKRSVMTLAYGSKEFGFRQQVLRHTIQWAIDSGKGLMFTQPNQAAGYMAKLIWESVSVTVVAAVEAMNWLKSAAKLLAAEVKDKKTGEILRKRCAVHWVTPDGFPVWQEYKKPIQTRLNLMFLGQFRLQPTINTNKDSEIDARKQESGIAPNFVHSQDGSHLRKTVVWAHEKYGIESFALIHDSFGTIPADAANLFKAVRETMVDTYESCDVLADFYDQFADQLHESQLDKMPALPAKGNLNLRDILESDFAFA

SEQ ID NO: 241 - DNA, 2670 bp, synthetic construct
  misc_feature 1..2670: note = Variant of RNA polymerase
  source 1..2670: mol_type = other DNA
atgcaccatcaccatcaccatatgaacacgattaacatcgctaagaacgacttctctgacatcgaactggctgctatcccgttcaacactctggctgaccattacggtgagcgcttagctcgcgaacagttggcccttgagcatgagtcttacgagatgggtgaagcacgtttccgcaagatgtttgagcgtcaacttaaagctggtgaggttgcggataacgctgccgccaagcctctcatcactaccctactccctaagatgattgcacgcatcaacgactggtttgaggaagtgaaagctaagcgcggcaagcgcccgacagccttccagttcctgcaagaaatcaagccggaagccgtagcgtacatcaccattaagaccactctggcttgcctaaccagtgcggaccgtacaaccgttcaggctgtagcaagcgcaatcggtcgggccattgaggacgaggctcgcttcggtcgtatccgtgaccttgaagctaagcacttcaagaaaaactatgaggaacaactcaacaagcgcgtagggcacgtctacaagaaagcatttatgcaagttgtcgaggctgacatgctctctaagggtctactcggtggcgaggcgtggtcttcgtggcataaggaagactctattcatgtaggagtacgctgcatcgagatgctcattgagtcaaccggaatggttagcttacaccgccaaaatgctggcgtagtaggtcaagactctgagactatcgaactcgcacctgaatacgctgaggctatcgcaacccgtgcaggtgcgctggctggcatctctccgatgttccaaccttgcgtagttcctcctaagccgtggactggcattactggtggtggctattgggctaacggtcgtcgtcctctggcgctggtgcgtactcacagtaagaaaggtctgatgcgctacgaagacgtttacatgcctgaggtgtacaaagcgattaacattgcgcaaaacaccgcctggtcgatcaacaagtgggtcctggcggtcgccaacgtaatcaccaagtggaagcattgtccggtccgggacatccctgcgattgagcgtgaagaactcccgatgaaaccggaagacatcgacatgaatcctgaggctctcaccgcgtggaaacgtgctaaagctgctgtgtaccgcagagacaaggctcgcaagtctcgccgtatcttgcttgagttcatgcttgagcaagccaataagtttgctaaccataaggccatctggttcccttacaacatggactggcgcggtcgtgtttacgctgtgtcaatgttcaacccgcaaggtaacgatatgaccaaaggactgcttacgctggcgaaaggtaaaccaatcggtaaggaaggttactactggctgaaaatccacggtgcaaactgtgcgggtgtcgataaggttccgttccctgagcgcatcaagttcattgaggaaaaccacgagaacatcatggcttgcgctaagtctccactggagaacacttggtgggctgagcaagatagtccgttccgcttccttgcgttctgctttgagtacgctggggtacagcaccacggcctgagctataactgctcccttccgctggcgtttgacgggtcttgctctggcatccagcacttctccgcgatgctccgagatgaggtaggtggtcgcgcggttaacttgcttcctagtgaaaccgttcaggacatctacgggattgttgctaagaaagtcaacgagattctacaagcagacgcaatcaatgggaccgataacgaagtagttaccgtgaccgatgaaaacactggtgaaatctctgagaaagtcaagctgggcactaaggcactggctggtcaatggctggcttacggtgttactcgcagtgtgactaagcgttcagtcatgacgctggcttacgggtccaaagagttcggcttccgtcaacaagtgctgcgccacactattcagtgggctattgattccggcaagggtctgatgttcactcagccgaatcaggctgctggatacatggctaagctgatttgggaatctgtgagcgtgacggtggtagctgcggttgaagcaatgaactggcttaagtctgctgctaagctgctggctgctgaggtcaaagataagaagactggagagattcttcgcaagcgttgcgctgtgcattgggtaactcctgatggtttccctgtgtggcaggaatacaagaagcctattcagacgcgcttgaacctgatgttcctcggtcagttccgcttacagcctaccattaacaccaacaaagatagcgagattgatgcacgtaaacaggagtctggtatcgctcctaactttgtacacagccaagacggtagccaccttcgtaagactgtagtgtgggcacacgagaagtacggaatcgaatcttttgcactgattcacgactccttcggtaccattccggctgacgctgcgaacctgttcaaagcagtgcgcgaaactatggttgacacatatgagtcttgtgatgtactggctgatttctacgaccagttcgctgaccagttgcacgagtctcaattggacaaaatgccagcacttccggctaaaggtaacttgaacctccgtgacatcttagagtcggacttcgcgttcgcg

SEQ ID NO: 242 - protein, 890 aa, synthetic construct
  REGION 1..890: note = Variant of RNA polymerase
MHHHHHHMNTINIAKNDFSDIELAAIPFNTLADHYGERLAREQLALEHESYEMGEARFRKMFERQLKAGEVADNAAAKPLITTLLPKMIARINDWFEEVKAKRGKRPTAFQFLQEIKPEAVAYITIKTTLACLTSADRTTVQAVASAIGRAIEDEARFGRIRDLEAKHFKKNYEEQLNKRVGHVYKKAFMQVVEADMLSKGLLGGEAWSSWHKEDSIHVGVRCIEMLIESTGMVSLHRQNAGVVGQDSETIELAPEYAEAIATRAGALAGISPMFQPCVVPPKPWTGITGGGYWANGRRPLALVRTHSKKGLMRYEDVYMPEVYKAINIAQNTAWSINKWVLAVANVITKWKHCPVRDIPAIEREELPMKPEDIDMNPEALTAWKRAKAAVYRRDKARKSRRILLEFMLEQANKFANHKAIWFPYNMDWRGRVYAVSMFNPQGNDMTKGLLTLAKGKPIGKEGYYWLKIHGANCAGVDKVPFPERIKFIEENHENIMACAKSPLENTWWAEQDSPFRFLAFCFEYAGVQHHGLSYNCSLPLAFDGSCSGIQHFSAMLRDEVGGRAVNLLPSETVQDIYGIVAKKVNEILQADAINGTDNEVVTVTDENTGEISEKVKLGTKALAGQWLAYGVTRSVTKRSVMTLAYGSKEFGFRQQVLRHTIQWAIDSGKGLMFTQPNQAAGYMAKLIWESVSVTVVAAVEAMNWLKSAAKLLAAEVKDKKTGEILRKRCAVHWVTPDGFPVWQEYKKPIQTRLNLMFLGQFRLQPTINTNKDSEIDARKQESGIAPNFVHSQDGSHLRKTVVWAHEKYGIESFALIHDSFGTIPADAANLFKAVRETMVDTYESCDVLADFYDQFADQLHESQLDKMPALPAKGNLNLRDILESDFAFA

SEQ ID NO: 243 - DNA, 2670 bp, synthetic construct
  misc_feature 1..2670: note = Variant of RNA polymerase
  source 1..2670: mol_type = other DNA
atgcaccatcaccatcaccatatgaacacgattaacatcgctaagaacgacttctctgacatcgaactggctgctatcccgttcaacactctggctgaccattacggtgagggcttagctcgcgaacagttggcccttgagcatgagtcttacgagatgggtgaagcacgtttccgcaagatgtttgagcgtcaacttaaagctggtgaggttgcggataacgctgccgccaagcctctcatcactaccctactccctaagatgattgcacgcatcaacgactggtttgaggaagtgaaagctaagcgcggcaagcgcccgacagccttccagttcctgcaagaaatcaagccggaagccgtagcgtacatcaccattaagaccactctggcttgcctaaccagtgcggaccgtacaaccgttcaggctgtagcaagcgcaatcggtcgggccattgaggacgaggctcgcttcggtcgtatccgtgaccttgaagctaagcacttcaagaaaaactatgaggaacaactcaacaagcgcgtagggcacgtctacaagaaagcatttatgcaagttgtcgaggctgacatgctctctaagggtctactcggtggcgaggcgtggtcttcgtggcataaggaagactctattcatgtaggagtacgctgcatcgagatgctcattgagtcaaccggaatggttagcttacaccgccaaaatgctggcgtagtaggtcaagactctgagactatcgaactcgcacctgaatacgctgaggctatcgcaacccgtgcaggtgcgctggctggcatctctccgatgttccaaccttgcgtagttcctcctaagccgtggactggcattactggtggtggctattgggctaacggtcgtcgtcctctggcgctggtgcgtactcacagtaagaaaggtctgatgcgctacgaagacgtttacatgcctgaggtgtacaaagcgattaacattgcgcaaaacaccgcctggtcgatcaacaagtgggtcctggcggtcgccaacgtaatcaccaagtggaagcattgtccggtccgggacatccctgcgattgagcgtgaagaactcccgatgaaaccggaagacatcgacatgaatcctgaagctctcaccgcgtggaaacgtgctaaagctgctgtgtaccgcagagacaaggctcgcaagtctcgccgtatcttgcttgagttcatgcttgagcaagccaataagtttgctaaccataaggccatctggttcccttacaacatggactggcgcggtcgtgtttacgctgtgccgatgttcaacccgcaaggtaacgatatgaccaaaggactgcttacgctggcgaaaggtaaaccaatcggtaaggaaggttactactggctgaaaatccacggtgcaaactgtgcgggtgtcgataaggttccgttccctgagcgcatcaagttcattgaggaaaaccacgagaacatcatggcttgcgctaagtctccactggagaacacttggtgggctgagcaagatagtccgttctgcttccttgcgttctgctttgagtacgctgaggtacagcaccacggcctgagctataactgctcccttccgctggcgtttgacgggtcttgctctggcatccagcacttctccgcgatgctccgagatgaggtaggtggtcgcgcggttaacttgcttcctagtgaaaccgttcaggacatctacgggattgttgctaagaaagtcaacgagattctacaagcagacgcaatcaatgggaccgataacgaagtagttaccgtgaccgatgaaaacactggtgaaatctctgagaaagtcaagctgggcactaaggcactggctggtcaatggctggcttacggtgttactcgcagtgtgactaagcgttcagtcatgacgctggcttacgggtccaaagagttcggcttccgtcaacaagtgctgcgccacactattcagaaagctattgattccggcaagggtctgatgttcactcagccgaatcaggctgctggatacatggctaagctgatttgggaatctgtgagcgtgacggtggtagctgcggttgaagcaatgaactggcttaagtctgctgctaagctgctggctgctgaggtcaaagataagaagactggagagattcttcgcaagcgttgcgctgtgcattgggtaactcctgatggtttccctgtgtggcaggaatacaagaagcctattcagacgcgcttgaacctgatgttcctcggtcagttccgcttacagcctaccattaacaccaacaaagatagcgagattgatgcacataaacaggagtctggtatcgctcctaactttgtacacagccaagacggtagccaccttcgtaagactgtagtgtgggcacacgagaagtacggaatcgaatcttttgcactgattcacgactccttcggtaccattccggctgacgctgcgaacctgttcaaagcagtgcgcgaaactatggttgacacatatgagtcttgtgatgtactggctgatttctacgaccagttcgctgaccagttgcacgagtctcaattggacaaaatgccagcacttccggctaaaggtaacttgaacctccgtgacatcttagagtcggacttcgcgttcgcg

SEQ ID NO: 244 - protein, 890 aa, synthetic construct
  REGION 1..890: note = Variant of RNA polymerase
MHHHHHHMNTINIAKNDFSDIELAAIPFNTLADHYGEGLAREQLALEHESYEMGEARFRKMFERQLKAGEVADNAAAKPLITTLLPKMIARINDWFEEVKAKRGKRPTAFQFLQEIKPEAVAYITIKTTLACLTSADRTTVQAVASAIGRAIEDEARFGRIRDLEAKHFKKNYEEQLNKRVGHVYKKAFMQVVEADMLSKGLLGGEAWSSWHKEDSIHVGVRCIEMLIESTGMVSLHRQNAGVVGQDSETIELAPEYAEAIATRAGALAGISPMFQPCVVPPKPWTGITGGGYWANGRRPLALVRTHSKKGLMRYEDVYMPEVYKAINIAQNTAWSINKWVLAVANVITKWKHCPVRDIPAIEREELPMKPEDIDMNPEALTAWKRAKAAVYRRDKARKSRRILLEFMLEQANKFANHKAIWFPYNMDWRGRVYAVPMFNPQGNDMTKGLLTLAKGKPIGKEGYYWLKIHGANCAGVDKVPFPERIKFIEENHENIMACAKSPLENTWWAEQDSPFCFLAFCFEYAEVQHHGLSYNCSLPLAFDGSCSGIQHFSAMLRDEVGGRAVNLLPSETVQDIYGIVAKKVNEILQADAINGTDNEVVTVTDENTGEISEKVKLGTKALAGQWLAYGVTRSVTKRSVMTLAYGSKEFGFRQQVLRHTIQKAIDSGKGLMFTQPNQAAGYMAKLIWESVSVTVVAAVEAMNWLKSAAKLLAAEVKDKKTGEILRKRCAVHWVTPDGFPVWQEYKKPIQTRLNLMFLGQFRLQPTINTNKDSEIDAHKQESGIAPNFVHSQDGSHLRKTVVWAHEKYGIESFALIHDSFGTIPADAANLFKAVRETMVDTYESCDVLADFYDQFADQLHESQLDKMPALPAKGNLNLRDILESDFAFA

SEQ ID NO: 245 - DNA, 2670 bp, synthetic construct
  misc_feature 1..2670: note = Variant of RNA polymerase
  source 1..2670: mol_type = other DNA
atgcaccatcaccatcaccatatgaacacgattaacatcgctaagaacgacttctctgacatcgaactggctgctatcccgttcaacactctggctgaccattacggtgagggcttagctcgcgaacagttggcccttgagcatgagtcttacgagatgggtgaagcacgtttccgcaagatgtttgagcgtcaacttaaagctggtgaggttgcggataacgctgccgccaagcctctcatcactaccctactccctaagatgattgcacgcatcaacgactggtttgaggaagtgaaagctaagcgcggcaagcgcccgacagccttccagttcctgcaagaaatcaagccggaagccgtagcgtacatcaccattaagaccactctggcttgcctaaccagtgcggaccgtacaaccgttcaggctgtagcaagcgcaatcggtcgggccattgaggacgaggctcgcttcggtcgtatccgtgaccttgaagctaagcacttcaagaaaaactatgaggaacaactcaacaagcgcgtagggcacgtctacaagaaagcatttatgcaagttgtcgaggctgacatgctctctaagggtctactcggtggcgagtcgtggtcttcgtggcataaggaagactctattcatgtaggagtacgctgcatcgagatgctcattgagtcaaccggaatggttagcttacaccgccaaaatgctggcgtagtaggtcaagactctgagactatcgaactcgcacctgaatacgctgaggctatcgcaacccgtgcaggtgcgctggctggcatctctccgatgttccaaccttgcgtagttcctcctaagccgtggactggcattactggtggtggctattgggctaacggtcgtcgtcctctggcgctggtgcgtactcacagtaagaaaggtctgatgcgctacgaagacgtttacatgcctgaggtgtacaaagcgattaacattgcgcaaaacaccgcctggtcgatcaacaagtgggtcctggcggtcgccaacgtaatcaccaagtggaagcattgtccggtccgggacatccctgcgattgagcgtgaagaactcccgatgaaaccggaagacatcgacatgaatcctagcgctctcaccgcgtggaaacgtgctaaagctgctgtgtaccgcagagacaaggctcgcaagtctcgtcgtatcctgcttgagttcatgcttgagcaagccaataagtttgctaaccataaggccatctggttcccttacaacatggactggcgcggtcgtgtttacgctgtgccgatgttcaacccgcaaggtaacgatatgaccaaaggactgcttacgctggcgaaaggtaaaccaatcggtaaggaaggttactactggctgaaaatccacggtgcaaactgtgcgggtgtcgataaggttccgttccctgagcgcatcaagttcattgaggaaaaccacgagaacatcatggcttgcgctaagtctccactggagaacacttggtgggctgagcaagatagtccgttctgcttccttgcgttctgctttgagtacgctggggtacagcaccacggcctgagctataactgctcccttccgctggcgtttgacgggtcttgctctggcatccagcacttctccgcgatgctccgagatgaggtaggtggtcgcgcggttaacttgcttcctagtgaaaccgttcaggacatctacgggattgttgctaagaaagtcaacgagattctacaagcagacgcaatcaatgggaccgataacgaagtagttaccgtgaccgatgaaaacactggtgaaatctctgagaaagtcaagctgggcactaaggcactggctggtcaatggctggcttacggtgttactcgcagtgtgactaagcgttcagtcatgacgctggcttacgggtccaaagagttcggcttccgtcaacaagtgctgcgccacactattcagtgggctattgattccggcaaaggtctgatgttcactcagccgaatcaggctgctggatacatggctaagctgatttgggaatctgtgagcgtgacggtggtagctgcggttgaagcaatgaactggcttaagtctgctgctaagctgctggctgctgaggtcaaagataagaagactggagagattcttcgcaagcgttgcgctgtgcattgggtaactcctgatggtttccctgtgtggcaggaatacaagaagcctattcagacgcgcttgaacctgatgttcctcggtcagttccgcttacagcctaccattaacaccaacaaagatagcgagattgatgcacataaacaggagtctggtatcgctcctaactttgtacacagccaagacggtagccaccttcgtaagactgtagtgtgggcacacgagaagtacggaatcgaatcttttgcactgattcacgactccttcggtaccattccggctgacgctgcgaacctgttcaaagcagtgcgcgaaactatggttgacacatatgagtcttgtgatgtactggctgatttctacgaccagttcgctgaccagttgcacgagtctcaattggacaaaatgccagcacttccggctaaaggtaacttgaacctccgtgacatcttagagtcggacttcgcgttcgcg

SEQ ID NO: 246 - protein, 890 aa, synthetic construct
  REGION 1..890: note = Variant of RNA polymerase
MHHHHHHMNTINIAKNDFSDIELAAIPFNTLADHYGEGLAREQLALEHESYEMGEARFRKMFERQLKAGEVADNAAAKPLITTLLPKMIARINDWFEEVKAKRGKRPTAFQFLQEIKPEAVAYITIKTTLACLTSADRTTVQAVASAIGRAIEDEARFGRIRDLEAKHFKKNYEEQLNKRVGHVYKKAFMQVVEADMLSKGLLGGESWSSWHKEDSIHVGVRCIEMLIESTGMVSLHRQNAGVVGQDSETIELAPEYAEAIATRAGALAGISPMFQPCVVPPKPWTGITGGGYWANGRRPLALVRTHSKKGLMRYEDVYMPEVYKAINIAQNTAWSINKWVLAVANVITKWKHCPVRDIPAIEREELPMKPEDIDMNPSALTAWKRAKAAVYRRDKARKSRRILLEFMLEQANKFANHKAIWFPYNMDWRGRVYAVPMFNPQGNDMTKGLLTLAKGKPIGKEGYYWLKIHGANCAGVDKVPFPERIKFIEENHENIMACAKSPLENTWWAEQDSPFCFLAFCFEYAGVQHHGLSYNCSLPLAFDGSCSGIQHFSAMLRDEVGGRAVNLLPSETVQDIYGIVAKKVNEILQADAINGTDNEVVTVTDENTGEISEKVKLGTKALAGQWLAYGVTRSVTKRSVMTLAYGSKEFGFRQQVLRHTIQWAIDSGKGLMFTQPNQAAGYMAKLIWESVSVTVVAAVEAMNWLKSAAKLLAAEVKDKKTGEILRKRCAVHWVTPDGFPVWQEYKKPIQTRLNLMFLGQFRLQPTINTNKDSEIDAHKQESGIAPNFVHSQDGSHLRKTVVWAHEKYGIESFALIHDSFGTIPADAANLFKAVRETMVDTYESCDVLADFYDQFADQLHESQLDKMPALPAKGNLNLRDILESDFAFA

SEQ ID NO: 247 - DNA, 2670 bp, synthetic construct
  misc_feature 1..2670: note = Variant of RNA polymerase
  source 1..2670: mol_type = other DNA
atgcaccatcaccatcaccatatgaacacgattaacatcgctaagaacgacttctctgacatcgaactggctgctatcccgttcaacactctggctgaccattacggtgagcgtttagctcgcgaacagttggcccttgagcatgagtcttacgagatgggtgaagcacgtttccgcaagatgtttgagcgtcaacttaaagctggtgaggttgcggataacgctgccgccaagcctctcatcactaccctactccctaagatgattgcacgcatcaacgactggtttgaggaagtgaaagctaagcgcggcaagcgcccgacagccttccagttcctgcaagaaatcaagccggaagccgtagcgtacatcaccattaagaccactctggcttgcctaaccagtgcggaccgtacaaccgttcaggctgtagcaagcgcaatcggtcgggccattgaggacgaggctcgcttcggtcgtatccgtgaccttgaagctaagcacttcaagaaaaactatgaggaacaactcaacaagcgcgtagggcacgtctacaagaaagcatttatgcaagttgtcgaggctgacatgctctctaagggtctactcggtggcgaggcgtggtcttcgtggcataaggaagactctattcatgtaggagtacgctgcatcgagatgctcattgagtcaaccggaatggttagcttacaccgccaaaatgctggcgtagtaggtcaagactctgagactatcgaactcgcacctgaatacgctgaggctatcgcaacccgtgcaggtgcgctggctggcatctctccgatgttccaaccttgcgtagttcctcctaagccgtggactggcattactggtggtggctattgggctaacggtcgtcgtcctctggcgctggtgcgtactcacagtaagaaaggtctgatgcgctacgaagacgtttacatgcctgaggtgtacaaagcgattaacattgcgcaaaacaccgcctggtcgatcaacaagtgggtcctggcggtcgccaacgtaatcaccaagtggaagcattgtccggtccgggacatccctgcgattgagcgtgaagaactcccgatgaaaccggaagacatcgacatgaatcctgaggctctcaccgcgtggaaacgtgctaaagctgctgtgtaccgcagagacaaggctcgcaagtctcgccgtatcttgcttgagttcatgcttgagcaagccaataagtttgctaaccataaggccatctggttcccttacaacatggactggcgcggtcgtgtttacgctgtgtcaatgttcaacccgcaaggtaacgatatgaccaaaggactgcttacgctggcgaaaggtaaaccaatcggtaaggaaggttactactggctgaaaatccacggtgcaaactgtgcgggtgtcgataaggttccgttccctgagcgcatcaagttcattgaggaaaaccacgagaacatcatggcttgcgctaagtctccactggagaacacttggtgggctgagcaagatagtccgttctgcttccttgcgttctgctttgagtacgctggggtacagcaccacggcctgagctataactgctcccttccgctggcgtttgacgggtcttgctctggcatccagcacttctccgcgatgctccgagatgaggtaggtggtcgcgcggttaacttgcttcctagtgaaaccgttcaggacatctacgggattgttgctaagaaagtcaacgagattctacaagcagacgcaatcaatgggaccgataacgaagtagttaccgtgaccgatgagaacactggtgaaatctctgagaaagtcaagctgggcactaaggcactggctggtcaatggctggcttacggtgttactcgcagtgtgactaagcgttcagtcatgacgctggcttacgggtccaaagagttcggcttccgtcaacaagtgctgcgccacactattcagaaagctattgattccggccgtggtctgatgttcactcagccgaatcaggctgctggatacatggctaagctgatttgggaatctgtgagcgtgacggtggtagctgcggttgaagcaatgaactggcttaagtctgctgctaagctgctggctgctgaggtcaaagataagaagactggagagattcttcgcaagcgttgcgctgtgcattgggtaactcctgatggtttccctgtgtggcaggaatacaagaagcctattcagacgcgcttgaacctgatgttcctcggtcagttccgcttacagcctaccattaacaccaacaaagatagcgagattgatgcacgtaaacaggagtctggtatcgctcctaactttgtacacagccaagacggtagccaccttcgtaagactgtagtgtgggcacacgagaagtacggaatcgaatcttttgcactgattcacgactccttcggtaccattccggctgacgctgcgaacctgttcaaagcagtgcgcgaaactatggttgacacatatgagtcttgtgatgtactggctgatttctacgaccagttcgctgaccagttgcacgagtctcaattggacaaaatgccagcacttccggctaaaggtaacttgaacctccgtgacatcttagagtcggacttcgcgttcgcg

SEQ ID NO: 248 - protein, 890 aa, synthetic construct
  REGION 1..890: note = Variant of RNA polymerase
MHHHHHHMNTINIAKNDFSDIELAAIPFNTLADHYGERLAREQLALEHESYEMGEARFRKMFERQLKAGEVADNAAAKPLITTLLPKMIARINDWFEEVKAKRGKRPTAFQFLQEIKPEAVAYITIKTTLACLTSADRTTVQAVASAIGRAIEDEARFGRIRDLEAKHFKKNYEEQLNKRVGHVYKKAFMQVVEADMLSKGLLGGEAWSSWHKEDSIHVGVRCIEMLIESTGMVSLHRQNAGVVGQDSETIELAPEYAEAIATRAGALAGISPMFQPCVVPPKPWTGITGGGYWANGRRPLALVRTHSKKGLMRYEDVYMPEVYKAINIAQNTAWSINKWVLAVANVITKWKHCPVRDIPAIEREELPMKPEDIDMNPEALTAWKRAKAAVYRRDKARKSRRILLEFMLEQANKFANHKAIWFPYNMDWRGRVYAVSMFNPQGNDMTKGLLTLAKGKPIGKEGYYWLKIHGANCAGVDKVPFPERIKFIEENHENIMACAKSPLENTWWAEQDSPFCFLAFCFEYAGVQHHGLSYNCSLPLAFDGSCSGIQHFSAMLRDEVGGRAVNLLPSETVQDIYGIVAKKVNEILQADAINGTDNEVVTVTDENTGEISEKVKLGTKALAGQWLAYGVTRSVTKRSVMTLAYGSKEFGFRQQVLRHTIQKAIDSGRGLMFTQPNQAAGYMAKLIWESVSVTVVAAVEAMNWLKSAAKLLAAEVKDKKTGEILRKRCAVHWVTPDGFPVWQEYKKPIQTRLNLMFLGQFRLQPTINTNKDSEIDARKQESGIAPNFVHSQDGSHLRKTVVWAHEKYGIESFALIHDSFGTIPADAANLFKAVRETMVDTYESCDVLADFYDQFADQLHESQLDKMPALPAKGNLNLRDILESDFAFA

SEQ ID NO: 249 - DNA, 2670 bp, synthetic construct
  misc_feature 1..2670: note = Variant of RNA polymerase
  source 1..2670: mol_type = other DNA
atgcaccatcaccatcaccatatgaacacgattaacatcgctaagaacgacttctctgacatcgaactggctgctatcccgttcaacactctggctgaccattacggtgagggcttagctcgcgaacagttggcccttgagcatgagtcttacgagatgggtgaagcacgtttccgcaagatgtttgagcgtcaacttaaagctggtgaggttgcggataacgctgccgccaagcctctcatcactaccctactccctaagatgattgcacgcatcaacgactggtttgaggaagtgaaagctaagcgcggcaagcgcccgacagccttccagttcctgcaagaaatcaagccggaagccgtagcgtacatcaccattaagaccactctggcttgcctaaccagtgcggaccgtacaaccgttcaggctgtagcaagcgcaatcggtcgggccattgaggacgaggctcgcttcggtcgtatccgtgaccttgaagctaagcacttcaagaaaaactatgaggaacaactcaacaagcgcgtagggcacgtctacaagaaagcatttatgcaagttgtcgaggctgacatgctctctaagggtctactcggtggcgaggcgtggtcttcgtggcataaggaagactctattcatgtaggagtacgctgcatcgagatgctcattgagtcaaccggaatggttagcttacaccgccaaaatgctggcgtagtaggtcaagactctgagactatcgaactcgcacctgaatacgctgaggctatcgcaacccgtgcaggtgcgctggctggcatctctccgatgttccaaccttgcgtagttcctcctaagccgtggactggcattactggtggtggctattgggctaacggtcgtcgtcctctggcgctggtgcgtactcacagtaagaaaggtctgatgcgctacgaagacgtttacatgcctgaggtgtacaaagcgattaacattgcgcaaaacaccgcctggtcgatcaacaagtgggtcctggcggtcgccaacgtaatcaccaagtggaagcattgtccggtccgggacatccctgcgattgagcgtgaagaactcccgatgaaaccggaagacatcgacatgaatcctgaggctctcaccgcgtggaaacgtgctaaagctgctgtgtaccgcagagacaaggctcgcaagtctcgccgtatcttgcttgagttcatgcttgagcaagccaataagtttgctaaccataaggccatctggttcccttacaacatggactggcgcggtcgtgtttacgctgtgtcaatgttcaacccgcaaggtaacgatatgaccaaaggactgcttacgctggcgaaaggtaaaccaatcggtaaggaaggttactactggctgaaaatccacggtgcaaactgtgcgggtgtcgataaggttccgttccctgagcgcatcaagttcattgaggaaaaccacgagaacatcatggcttgcgctaagtctccactggagaacacttggtgggctgagcaagatagtccgttctgcttccttgcgttctgctttgagtacgctggggtacagcaccacggcctgagctataactgctcccttccgctggcgtttgacgggtcttgctctggcatccagcacttctccgcgatgctccgagatgaggtaggtggtcgcgcggttaacttgcttcctagtgaaaccgttcaggacatctacgggattgttgctaagaaagtcaacgagattctacaagcagacgcaatcaatgggaccgataacgaagtagttaccgtgaccgatgaaaacactggtgaaatctctgagaaagtcaagctgggcactaaggcactggctggtcaatggctggcttacggtgttactcgcagtgtgactaagcgttcagtcatgacgctggcttacgggtccaaagagttcggcttccgtcaacaagtgctgcgccacactattcagtgggctattgattccggcaagggtctgatgttcactcagccgaatcaggctgctggatacatggctaagctgatttgggaatctgtgagcgtgacggtggtagctgcggttgaagcaatgaactggcttaagtctgctgctaagctgctggctgctgaggtcaaagataagaagactggagagattcttcgcaagcgttgcgctgtgcattgggtaactcctgatggtttccctgtgtggcaggaatacaagaagcctattcagacgcgcttgaacctgatgttcctcggtcagttccgcttacagcctaccattaacaccaacaaagatagcgagattgatgcacgtaaacaggagtctggtatcgctcctaactttgtacacagccaagacggtagccaccttcgtaagactgtagtgtgggcacacgagaagtacggaatcgaatcttttgcactgattcacgactccttcggtaccattccggctgacgctgcgaacctgttcaaagcagtgcgcgaaactatggttgacacatatgagtcttgtgatgtactggctgatttctacgaccagttcgctgaccagttgcacgagtctcaattggacaaaatgccagcacttccggctaaaggtaacttgaacctccgtgacatcttagagtcggacttcgcgttcgcg

SEQ ID NO: 250 - protein, 890 aa, synthetic construct
  REGION 1..890: note = Variant of RNA polymerase
MHHHHHHMNTINIAKNDFSDIELAAIPFNTLADHYGEGLAREQLALEHESYEMGEARFRKMFERQLKAGEVADNAAAKPLITTLLPKMIARINDWFEEVKAKRGKRPTAFQFLQEIKPEAVAYITIKTTLACLTSADRTTVQAVASAIGRAIEDEARFGRIRDLEAKHFKKNYEEQLNKRVGHVYKKAFMQVVEADMLSKGLLGGEAWSSWHKEDSIHVGVRCIEMLIESTGMVSLHRQNAGVVGQDSETIELAPEYAEAIATRAGALAGISPMFQPCVVPPKPWTGITGGGYWANGRRPLALVRTHSKKGLMRYEDVYMPEVYKAINIAQNTAWSINKWVLAVANVITKWKHCPVRDIPAIEREELPMKPEDIDMNPEALTAWKRAKAAVYRRDKARKSRRILLEFMLEQANKFANHKAIWFPYNMDWRGRVYAVSMFNPQGNDMTKGLLTLAKGKPIGKEGYYWLKIHGANCAGVDKVPFPERIKFIEENHENIMACAKSPLENTWWAEQDSPFCFLAFCFEYAGVQHHGLSYNCSLPLAFDGSCSGIQHFSAMLRDEVGGRAVNLLPSETVQDIYGIVAKKVNEILQADAINGTDNEVVTVTDENTGEISEKVKLGTKALAGQWLAYGVTRSVTKRSVMTLAYGSKEFGFRQQVLRHTIQWAIDSGKGLMFTQPNQAAGYMAKLIWESVSVTVVAAVEAMNWLKSAAKLLAAEVKDKKTGEILRKRCAVHWVTPDGFPVWQEYKKPIQTRLNLMFLGQFRLQPTINTNKDSEIDARKQESGIAPNFVHSQDGSHLRKTVVWAHEKYGIESFALIHDSFGTIPADAANLFKAVRETMVDTYESCDVLADFYDQFADQLHESQLDKMPALPAKGNLNLRDILESDFAFA

SEQ ID NO: 251 - DNA, 2670 bp, synthetic construct
  misc_feature 1..2670: note = Variant of RNA polymerase
  source 1..2670: mol_type = other DNA
atgcaccatcaccatcaccatatgaacacgattaacatcgctaagaacgacttctctgacatcgaactggctgctatcccgttcaacactctggctgaccattacggtgagggcttagctcgcgaacagttggcccttgagcatgagtcttacgagatgggtgaagcacgtttccgcaagatgtttgagcgtcaacttaaagctggtgaggttgcggataacgctgccgccaagcctctcatcactaccctactccctaagatgattgcacgcatcaacgactggtttgaggaagtgaaagctaagcgcggcaagcgcccgacagccttccagttcctgcaagaaatcaagccggaagccgtagcgtacatcaccattaagaccactctggcttgcctaaccagtgcggaccgtacaaccgttcaggctgtagcaagcgcaatcggtcgggccattgaggacgaggctcgcttcggtcgtatccgtgaccttgaagctaagcacttcaagaaaaactatgaggaacaactcaacaagcgcgtagggcacgtctacaagaaagcatttatgcaagttgtcgaggctgacatgctctctaagggtctactcggtggcgaggcgtggtcttcgtggcataaggaagactctattcatgtaggagtacgctgcatcgagatgctcattgagtcaaccggaatggttagcttacaccgccaaaatgctggcgtagtaggtcaagactctgagactatcgaactcgcacctgaatacgctgaggctatcgcaacccgtgcaggtgcgctggctggcatctctccgatgttccaaccttgcgtagttcctcctaagccgtggactggcattactggtggtggctattgggctaacggtcgtcgtcctctggcgctggtgcgtactcacagtaagaaaggtctgatgcgctacgaagacgtttacatgcctgaggtgtacaaagcgattaacattgcgcaaaacaccgcctggtcgatcaacaagtgggtcctggcggtcgccaacgtaatcaccaagtggaagcattgtccggtccgggacatccctgcgattgagcgtgaagaactcccgatgaaaccggaagacatcgacatgaatcctgaagctctcaccgcgtggaaacgtgctaaagctgctgtgtaccgcagagacaaggctcgcaagtctcgccgtatcttgcttgagttcatgcttgagcaagccaataagtttgctaaccataaggccatctggttcccttacaacatggactggcgcggtcgtgtttacgctgtgccgatgttcaacccgcaaggtaacgatatgaccaaaggactgcttacgctggcgaaaggtaaaccaatcggtaaggaaggttactactggctgaaaatccacggtgcaaactgtgcgggtgtcgataaggttccgttccctgagcgcatcaagttcattgaggaaaaccacgagaacatcatggcttgcgctaagtctccactggagaacacttggtgggctgagcaagatagtccgttccgcttccttgcgttctgctttgagtacgctggggtacagcaccacggcctgagctataactgctcccttccgctggcgtttgacgggtcttgctctggcatccagcacttctccgcgatgctccgagatgaggtaggtggtcgcgcggttaacttgcttcctagtgaaaccgttcaggacatctacgggattgttgctaagaaagtcaacgagattctacaagcagacgcaatcaatgggaccgataacgaagtagttaccgtgaccgatgaaaacactggtgaaatctctgagaaagtcaagctgggcactaaggcactggctggtcaatggctggcttacggtgttactcgcagtgtgactaagcgttcagtcatgacgctggcttacgggtccaaagagttcggcttccgtcaacaagtgctgcgccacactattcagtgggctattgattccggcaagggtctgatgttcactcagccgaatcaggctgctggatacatggctaagctgatttgggaatctgtgagcgtgacggtggtagctgcggttgaagcaatgaactggcttaagtctgctgctaagctgctggctgctgaggtcaaagataagaagactggagagattcttcgcaagcgttgcgctgtgcattgggtaactcctgatggtttccctgtgtggcaggaatacaagaagcctattcagacgcgcttgaacctgatgttcctcggtcagttccgcttacagcctaccattaacaccaacaaagatagcgagattgatgcacataaacaggagtctggtatcgctcctaactttgtacacagccaagacggtagccaccttcgtaagactgtagtgtgggcacacgagaagtacggaatcgaatcttttgcactgattcacgactccttcggtaccattccggctgacgctgcgaacctgttcaaagcagtgcgcgaaactatggttgacacatatgagtcttgtgatgtactggctgatttctacgaccagttcgctgaccagttgcacgagtctcaattggacaaaatgccagcacttccggctaaaggtaacttgaacctccgtgacatcttagagtcggacttcgcgttcgcg

SEQ ID NO: 252 - protein, 890 aa, synthetic construct
  REGION 1..890: note = Variant of RNA polymerase
MHHHHHHMNTINIAKNDFSDIELAAIPFNTLADHYGEGLAREQLALEHESYEMGEARFRKMFERQLKAGEVADNAAAKPLITTLLPKMIARINDWFEEVKAKRGKRPTAFQFLQEIKPEAVAYITIKTTLACLTSADRTTVQAVASAIGRAIEDEARFGRIRDLEAKHFKKNYEEQLNKRVGHVYKKAFMQVVEADMLSKGLLGGEAWSSWHKEDSIHVGVRCIEMLIESTGMVSLHRQNAGVVGQDSETIELAPEYAEAIATRAGALAGISPMFQPCVVPPKPWTGITGGGYWANGRRPLALVRTHSKKGLMRYEDVYMPEVYKAINIAQNTAWSINKWVLAVANVITKWKHCPVRDIPAIEREELPMKPEDIDMNPEALTAWKRAKAAVYRRDKARKSRRILLEFMLEQANKFANHKAIWFPYNMDWRGRVYAVPMFNPQGNDMTKGLLTLAKGKPIGKEGYYWLKIHGANCAGVDKVPFPERIKFIEENHENIMACAKSPLENTWWAEQDSPFRFLAFCFEYAGVQHHGLSYNCSLPLAFDGSCSGIQHFSAMLRDEVGGRAVNLLPSETVQDIYGIVAKKVNEILQADAINGTDNEVVTVTDENTGEISEKVKLGTKALAGQWLAYGVTRSVTKRSVMTLAYGSKEFGFRQQVLRHTIQWAIDSGKGLMFTQPNQAAGYMAKLIWESVSVTVVAAVEAMNWLKSAAKLLAAEVKDKKTGEILRKRCAVHWVTPDGFPVWQEYKKPIQTRLNLMFLGQFRLQPTINTNKDSEIDAHKQESGIAPNFVHSQDGSHLRKTVVWAHEKYGIESFALIHDSFGTIPADAANLFKAVRETMVDTYESCDVLADFYDQFADQLHESQLDKMPALPAKGNLNLRDILESDFAFA

SEQ ID NO: 253 - DNA, 2670 bp, synthetic construct
  misc_feature 1..2670: note = Variant of RNA polymerase
  source 1..2670: mol_type = other DNA
atgcaccatcaccatcaccatatgaacacgattaacatcgctaagaacgacttctctgacatcgaactggctgctatcccgttcaacactctggctgaccattacggtgagcgcttagctcgcgaacagttggcccttgagcatgagtcttacgagatgggtgaagcacgtttccgcaagatgtttgagcgtcaacttaaagctggtgaggttgcggataacgctgccgccaagcctctcatcactaccctactccctaagatgattgcacgcatcaacgactggtttgaggaagtgaaagctaagcgcggcaagcgcccgacagccttccagttcctgcaagaaatcaagccggaagccgtagcgtacatcaccattaagaccactctggcttgcctaaccagtgcggaccgtacaaccgttcaggctgtagcaagcgcaatcggtcgggccattgaggacgaggctcgcttcggtcgtatccgtgaccttgaagctaagcacttcaagaaaaactatgaggaacaactcaacaagcgcgtagggcacgtctacaagaaagcatttatgcaagttgtcgaggctgacatgctctctaagggtctactcggtggcgaggcgtggtcttcgtggcataaggaagactctattcatgtaggagtacgctgcatcgagatgctcattgagtcaaccggaatggttagcttacaccgccaaaatgctggcgtagtaggtcaagactctgagactatcgaactcgcacctgaatacgctgaggctatcgcaacccgtgcaggtgcgctggctggcatctctccgatgttccaaccttgcgtagttcctcctaagccgtggactggcattactggtggtggctattgggctaacggtcgtcgtcctctggcgctggtgcgtactcacagtaagaaaggtctgatgcgctacgaagacgtttacatgcctgaggtgtacaaagcgattaacattgcgcaaaacaccgcctggtcgatcaacaagtgggtcctggcggtcgccaacgtaatcaccaagtggaagcattgtccggtccgggacatccctgcgattgagcgtgaagaactcccgatgaaaccggaagacatcgacatgaatcctgaggctctcaccgcgtggaaacgtgctaaagctgctgtgtaccgcagagacaaggctcgcaagtctcgccgtatcttgcttgagttcatgcttgagcaagccaataagtttgctaaccataaggccatctggttcccttacaacatggactggcgcggtcgtgtttacgctgtgccgatgttcaacccgcaaggtaacgatatgaccaaaggactgcttacgctggcgaaaggtaaaccaatcggtaaggaaggttactactggctgaaaatccacggtgcaaactgtgcgggtgtcgataaggttccgttccctgagcgcatcaagttcattgaggaaaaccacgagaacatcatggcttgcgctaagtctccactggagaacacttggtgggctgagcaagatagtccgttctgcttccttgcgttctgctttgagtacgctggggtacagcaccacggcctgagctataactgctcccttccgctggcgtttgacgggtcttgctctggcatccagcacttctccgcgatgctccgagatgaggtaggtggtcgcgcggttaacttgcttcctagtgaaaccgttcaggacatctacgggattgttgctaagaaagtcaacgagattctacaagcagacgcaatcaatgggaccgataacgaagtagttaccgtgaccgatgagaacactggtgaaatctctgagaaagtcaagctgggcactaaggcactggctggtcaatggctggcttacggtgttactcgcagtgtgactaagcgttcagtcatgacgctggcttacgggtccaaagagttcggcttccgtcaacaagtgctgcgccacactattcagtgggctattgattccggcaagggtctgatgttcactcagccgaatcaggctgctggatacatggctaagctgatttgggaatctgtgagcgtgacggtggtagctgcggttgaagcaatgaactggcttaagtctgctgctaagctgctggctgctgaggtcaaagataagaagactggagagattcttcgcaagcgttgcgctgtgcattgggtaactcctgatggtttccctgtgtggcaggaatacaagaagcctattcagacgcgcttgaacctgatgttcctcggtcagttccgcttacagcctaccattaacaccaacaaagatagcgagattgatgcacgtaaacaggagtctggtatcgctcctaactttgtacacagccaagacggtagccaccttcgtaagactgtagtgtgggcacacgagaagtacggaatcgaatcttttgcactgattcacgactccttcggtaccattccggctgacgctgcgaacctgttcaaagcagtgcgcgaaactatggttgacacatatgagtcttgtgatgtactggctgatttctacgaccagttcgctgaccagttgcacgagtctcaattggacaaaatgccagcacttccggctaaaggtaacttgaacctccgtgacatcttagagtcggacttcgcgttcgcg

SEQ ID NO: 254 - protein, 890 aa, synthetic construct
  REGION 1..890: note = Variant of RNA polymerase
MHHHHHHMNTINIAKNDFSDIELAAIPFNTLADHYGERLAREQLALEHESYEMGEARFRKMFERQLKAGEVADNAAAKPLITTLLPKMIARINDWFEEVKAKRGKRPTAFQFLQEIKPEAVAYITIKTTLACLTSADRTTVQAVASAIGRAIEDEARFGRIRDLEAKHFKKNYEEQLNKRVGHVYKKAFMQVVEADMLSKGLLGGEAWSSWHKEDSIHVGVRCIEMLIESTGMVSLHRQNAGVVGQDSETIELAPEYAEAIATRAGALAGISPMFQPCVVPPKPWTGITGGGYWANGRRPLALVRTHSKKGLMRYEDVYMPEVYKAINIAQNTAWSINKWVLAVANVITKWKHCPVRDIPAIEREELPMKPEDIDMNPEALTAWKRAKAAVYRRDKARKSRRILLEFMLEQANKFANHKAIWFPYNMDWRGRVYAVPMFNPQGNDMTKGLLTLAKGKPIGKEGYYWLKIHGANCAGVDKVPFPERIKFIEENHENIMACAKSPLENTWWAEQDSPFCFLAFCFEYAGVQHHGLSYNCSLPLAFDGSCSGIQHFSAMLRDEVGGRAVNLLPSETVQDIYGIVAKKVNEILQADAINGTDNEVVTVTDENTGEISEKVKLGTKALAGQWLAYGVTRSVTKRSVMTLAYGSKEFGFRQQVLRHTIQWAIDSGKGLMFTQPNQAAGYMAKLIWESVSVTVVAAVEAMNWLKSAAKLLAAEVKDKKTGEILRKRCAVHWVTPDGFPVWQEYKKPIQTRLNLMFLGQFRLQPTINTNKDSEIDARKQESGIAPNFVHSQDGSHLRKTVVWAHEKYGIESFALIHDSFGTIPADAANLFKAVRETMVDTYESCDVLADFYDQFADQLHESQLDKMPALPAKGNLNLRDILESDFAFA

SEQ ID NO: 255 - DNA, 2670 bp, synthetic construct
  misc_feature 1..2670: note = Variant of RNA polymerase
  source 1..2670: mol_type = other DNA
atgcaccatcaccatcaccatatgaacacgattaacatcgctaagaacgacttctctgacatcgaactggctgctatcccgttcaacactctggctgaccattacggtgagggcttagctcgcgaacagttggcccttgagcatgagtcttacgagatgggtgaagcacgtttccgcaagatgtttgagcgtcaacttaaagctggtgaggttgcggataacgctgccgccaagcctctcatcactaccctactccctaagatgattgcacgcatcaacgactggtttgaggaagtgaaagctaagcgcggcaagcgcccgacagccttccagttcctgcaagaaatcaagccggaagccgtagcgtacatcaccattaagaccactctggcttgcctaaccagtgcggaccgtacaaccgttcaggctgtagcaagcgcaatcggtcgggccattgaggacgaggctcgcttcggtcgtatccgtgaccttgaagctaagcacttcaagaaaaactatgaggaacaactcaacaagcgcgtagggcacgtctacaagaaagcatttatgcaagttgtcgaggctgacatgctctctaagggtctactcggtggcgaggcgtggtcttcgtggcataaggaagactctattcatgtaggagtacgctgcatcgagatgctcattgagtcaaccggaatggttagcttacaccgccaaaatgctggcgtagtaggtcaagactctgagactatcgaactcgcacctgaatacgctgaggctatcgcaacccgtgcaggtgcgctggctggcatctctccgatgttccaaccttgcgtagttcctcctaagccgtggactggcattactggtggtggctattgggctaacggtcgtcgtcctctggcgctggtgcgtactcacagtaagaaaggtctgatgcgctacgaagacgtttacatgcctgaggtgtacaaagcgattaacattgcgcaaaacaccgcctggtcgatcaacaagtgggtcctggcggtcgccaacgtaatcaccaagtggaagcattgtccggtccgggacatccctgcgattgagcgtgaagaactcccgatgaaaccggaagacatcgacatgaatcctgaggctctcaccgcgtggaaacgtgctaaagctgctgtgtaccgcagagacaaggctcgcaagtctcgccgtatcttgcttgagttcatgcttgagcaagccaataagtttgctaaccataaggccatctggttcccttacaacatggactggcgcggtcgtgtttacgctgtgccgatgttcaacccgcaaggtaacgatatgaccaaaggactgcttacgctggcgaaaggtaaaccaatcggtaaggaaggttactactggctgaaaatccacggtgcaaactgtgcgggtgtcgataaggttccgttccctgagcgcatcaagttcattgaggaaaaccacgagaacatcatggcttgcgctaagtctccactggagaacacttggtgggctgagcaagatagtccgttctgcttccttgcgttctgctttgagtacgctggggtacagcaccacggcctgagctataactgctcccttccgctggcgtttgacgggtcttgctctggcatccagcacttctccgcgatgctccgagatgaggtaggtggtcgcgcggttaacttgcttcctagtgaaaccgttcaggacatctacgggattgttgctaagaaagtcaacgagattctacaagcagacgcaatcaatgggaccgataacgaagtagttaccgtgaccgattacaacactggtgaaatctctgagaaagtcaagctgggcactaaggcactggctggtcaatggctggcttacggtgttactcgcagtgtgactaagcgttcagtcatgacgctggcttacgggtccaaagagttcggcttccgtcaacaagtgctgcgccacactattcagtgggctattgattccggcaaaggtctgatgttcactcagccgaatcaggctgctggatacatggctaagctgatttgggaatctgtgagcgtgacggtggtagctgcggttgaagcaatgaactggcttaagtctgctgctaagctgctggctgctgaggtcaaagataagaagactggagagattcttcgcaagcgttgcgctgtgcattgggtaactcctgatggtttccctgtgtggcaggaatacaagaagcctattcagacgcgcttgaacctgatgttcctcggtcagttccgcttacagcctaccattaacaccaacaaagatagcgagattgatgcacataaacaggagtctggtatcgctcctaactttgtacacagccaagacggtagccaccttcgtaagactgtagtgtgggcacacgagaagtacggaatcgaatcttttgcactgattcacgactccttcggtaccattccggctgacgctgcgaacctgttcaaagcagtgcgcgaaactatggttgacacatatgagtcttgtgatgtactggctgatttctacgaccagttcgctgaccagttgcacgagtctcaattggacaaaatgccagcacttccggctaaaggtaacttgaacctccgtgacatcttagagtcggacttcgcgttcgcg

SEQ ID NO: 256 - protein, 890 aa, synthetic construct
  REGION 1..890: note = Variant of RNA polymerase
MHHHHHHMNTINIAKNDFSDIELAAIPFNTLADHYGEGLAREQLALEHESYEMGEARFRKMFERQLKAGEVADNAAAKPLITTLLPKMIARINDWFEEVKAKRGKRPTAFQFLQEIKPEAVAYITIKTTLACLTSADRTTVQAVASAIGRAIEDEARFGRIRDLEAKHFKKNYEEQLNKRVGHVYKKAFMQVVEADMLSKGLLGGEAWSSWHKEDSIHVGVRCIEMLIESTGMVSLHRQNAGVVGQDSETIELAPEYAEAIATRAGALAGISPMFQPCVVPPKPWTGITGGGYWANGRRPLALVRTHSKKGLMRYEDVYMPEVYKAINIAQNTAWSINKWVLAVANVITKWKHCPVRDIPAIEREELPMKPEDIDMNPEALTAWKRAKAAVYRRDKARKSRRILLEFMLEQANKFANHKAIWFPYNMDWRGRVYAVPMFNPQGNDMTKGLLTLAKGKPIGKEGYYWLKIHGANCAGVDKVPFPERIKFIEENHENIMACAKSPLENTWWAEQDSPFCFLAFCFEYAGVQHHGLSYNCSLPLAFDGSCSGIQHFSAMLRDEVGGRAVNLLPSETVQDIYGIVAKKVNEILQADAINGTDNEVVTVTDYNTGEISEKVKLGTKALAGQWLAYGVTRSVTKRSVMTLAYGSKEFGFRQQVLRHTIQWAIDSGKGLMFTQPNQAAGYMAKLIWESVSVTVVAAVEAMNWLKSAAKLLAAEVKDKKTGEILRKRCAVHWVTPDGFPVWQEYKKPIQTRLNLMFLGQFRLQPTINTNKDSEIDAHKQESGIAPNFVHSQDGSHLRKTVVWAHEKYGIESFALIHDSFGTIPADAANLFKAVRETMVDTYESCDVLADFYDQFADQLHESQLDKMPALPAKGNLNLRDILESDFAFA

SEQ ID NO: 257 - DNA, 2670 bp, synthetic construct
  misc_feature 1..2670: note = Variant of RNA polymerase
  source 1..2670: mol_type = other DNA
atgcaccatcaccatcaccatatgaacacgattaacatcgctaagaacgacttctctgacatcgaactggctgctatcccgttcaacactctggctgaccattacggtgagggcttagctcgcgaacagttggcccttgagcatgagtcttacgagatgggtgaagcacgtttccgcaagatgtttgagcgtcaacttaaagctggtgaggttgcggataacgctgccgccaagcctctcatcactaccctactccctaagatgattgcacgcatcaacgactggtttgaggaagtgaaagctaagcgcggcaagcgcccgacagccttccagttcctgcaagaaatcaagccggaagccgtagcgtacatcaccattaagaccactctggcttgcctaaccagtgcggaccgtacaaccgttcaggctgtagcaagcgcaatcggtcgggccattgaggacgaggctcgcttcggtcgtatccgtgaccttgaagctaagcacttcaagaaaaactatgaggaacaactcaacaagcgcgtagggcacgtctacaagaaagcatttatgcaagttgtcgaggctgacatgctctctaagggtctactcggtggcgaggcgtggtcttcgtggcataaggaagactctattcatgtaggagtacgctgcatcgagatgctcattgagtcaaccggaatggttagcttacaccgccaaaatgctggcgtagtaggtcaagactctgagactatcgaactcgcacctgaatacgctgaggctatcgcaacccgtgcaggtgcgctggctggcatctctccgatgttccaaccttgcgtagttcctcctaagccgtggactggcattactggtggtggctattgggctaacggtcgtcgtcctctggcgctggtgcgtactcacagtaagaaaggtctgatgcgctacgaagacgtttacatgcctgaggtgtacaaagcgattaacattgcgcaaaacaccgcctggtcgatcaacaagtgggtcctggcggtcgccaacgtaatcaccaagtggaagcattgtccggtccgggacatccctgcgattgagcgtgaagaactcccgatgaaaccggaagacatcgacatgaatcctagcgctctcaccgcgtggaaacgtgctaaagctgctgtgtaccgcagagacaaggctcgcaagtctcgccgtatcttgcttgagttcatgcttgagcaagccaataagtttgctaaccataaggccatctggttcccttacaacatggactggcgcggtcgtgtttacgctgtgtcaatgttcaacccgcaaggtaacgatatgaccaaaggactgcttacgctggcgaaaggtaaaccaatcggtaaggaaggttactactggctgaaaatccacggtgcaaactgtgcgggtgtcgataaggttccgttccctgagcgcatcaagttcattgaggaaaaccacgagaacatcatggcttgcgctaagtctccactggagaacacttggtgggctgagcaagatagtccgttctgcttccttgcgttctgctttgagtacgctggggtacagcaccacggcctgagctataactgctcccttccgctggcgtttgacgggtcttgctctggcatccagcacttctccgcgatgctccgagatgaggtaggtggtcgcgcggttaacttgcttcctagtgaaaccgttcaggacatctacgggattgttgctaagaaagtcaacgagattctacaagcagacgcaatcaatgggaccgataacgaagtagttaccgtgaccgatgaaaacactggtgaaatctctgagaaagtcaagctgggcactaaggcactggctggtcaatggctggcttacggtgttactcgcagtgtgactaagcgttcagtcatgacgctggcttacgggtccaaagagttcggcttccgtcaacaagtgctgcgccacactattcagtgggctattgattccggcaagggtctgatgttcactcagccgaatcaggctgctggatacatggctaagctgatttgggaatctgtgagcgtgacggtggtagctgcggttgaagcaatgaactggcttaagtctgctgctaagctgctggctgctgaggtcaaagataagaagactggagagattcttcgcaagcgttgcgctgtgcattgggtaactcctgatggtttccctgtgtggcaggaatacaagaagcctattcagacgcgcttgaacctgatgttcctcggtcagttccgcttacagcctaccattaacaccaacaaagatagcgagattgatgcacgtaaacaggagtctggtatcgctcctaactttgtacacagccaagacggtagccaccttcgtaagactgtagtgtgggcacacgagaagtacggaatcgaatcttttgcactgattcacgactccttcggtaccattccggctgacgctgcgaacctgttcaaagcagtgcgcgaaactatggttgacacatatgagtcttgtgatgtactggctgatttctacgaccagttcgctgaccagttgcacgagtctcaattggacaaaatgccagcacttccggctaaaggtaacttgaacctccgtgacatcttagagtcggacttcgcgttcgcg

SEQ ID NO: 258 - protein, 890 aa, synthetic construct
  REGION 1..890: note = Variant of RNA polymerase
MHHHHHHMNTINIAKNDFSDIELAAIPFNTLADHYGEGLAREQLALEHESYEMGEARFRKMFERQLKAGEVADNAAAKPLITTLLPKMIARINDWFEEVKAKRGKRPTAFQFLQEIKPEAVAYITIKTTLACLTSADRTTVQAVASAIGRAIEDEARFGRIRDLEAKHFKKNYEEQLNKRVGHVYKKAFMQVVEADMLSKGLLGGEAWSSWHKEDSIHVGVRCIEMLIESTGMVSLHRQNAGVVGQDSETIELAPEYAEAIATRAGALAGISPMFQPCVVPPKPWTGITGGGYWANGRRPLALVRTHSKKGLMRYEDVYMPEVYKAINIAQNTAWSINKWVLAVANVITKWKHCPVRDIPAIEREELPMKPEDIDMNPSALTAWKRAKAAVYRRDKARKSRRILLEFMLEQANKFANHKAIWFPYNMDWRGRVYAVSMFNPQGNDMTKGLLTLAKGKPIGKEGYYWLKIHGANCAGVDKVPFPERIKFIEENHENIMACAKSPLENTWWAEQDSPFCFLAFCFEYAGVQHHGLSYNCSLPLAFDGSCSGIQHFSAMLRDEVGGRAVNLLPSETVQDIYGIVAKKVNEILQADAINGTDNEVVTVTDENTGEISEKVKLGTKALAGQWLAYGVTRSVTKRSVMTLAYGSKEFGFRQQVLRHTIQWAIDSGKGLMFTQPNQAAGYMAKLIWESVSVTVVAAVEAMNWLKSAAKLLAAEVKDKKTGEILRKRCAVHWVTPDGFPVWQEYKKPIQTRLNLMFLGQFRLQPTINTNKDSEIDARKQESGIAPNFVHSQDGSHLRKTVVWAHEKYGIESFALIHDSFGTIPADAANLFKAVRETMVDTYESCDVLADFYDQFADQLHESQLDKMPALPAKGNLNLRDILESDFAFA

SEQ ID NO: 259 - DNA, 2670 bp, synthetic construct
  misc_feature 1..2670: note = Variant of RNA polymerase
  source 1..2670: mol_type = other DNA
atgcaccatcaccatcaccatatgaacacgattaacatcgctaagaacgacttctctgacatcgaactggctgctatcccgttcaacactctggctgaccattacggtgagcgtttagctcgcgaacagttggcccttgagcatgagtcttacgagatgggtgaagcacgtttccgcaagatgtttgagcgtcaacttaaagctggtgaggttgcggataacgctgccgccaagcctctcatcactaccctactccctaagatgattgcacgcatcaacgactggtttgaggaagtgaaagctaagcgcggcaagcgcccgacagccttccagttcctgcaagaaatcaagccggaagccgtagcgtacatcaccattaagaccactctggcttgcctaaccagtgcggaccgtacaaccgttcaggctgtagcaagcgcaatcggtcgggccattgaggacgaggctcgcttcggtcgtatccgtgaccttgaagctaagcacttcaagaaaaactatgaggaacaactcaacaagcgcgtagggcacgtctacaagaaagcatttatgcaagttgtcgaggctgacatgctctctaagggtctactcggtggcgaggcgtggtcttcgtggcataaggaagactctattcatgtaggagtacgctgcatcgagatgctcattgagtcaaccggaatggttagcttacaccgccaaaatgctggcgtagtaggtcaagactctgagactatcgaactcgcacctgaatacgctgaggctatcgcaacccgtgcaggtgcgctggctggcatctctccgatgttccaaccttgcgtagttcctcctaagccgtggactggcattactggtggtggctattgggctaacggtcgtcgtcctctggcgctggtgcgtactcacagtaagaaaggtctgatgcgctacgaagacgtttacatgcctgaggtgtacaaagcgattaacattgcgcaaaacaccgcctggtcgatcaacaagtgggtcctggcggtcgccaacgtaatcaccaagtggaagcattgtccggtccgggacatccctgcgattgagcgtgaagaactcccgatgaaaccggaagacatcgacatgaatcctgaggctctcaccgcgtggaaacgtgctaaagctgctgtgtaccgcagagacaaggctcgcaagtctcgccgtatcttgcttgagttcatgcttgagcaagccaataagtttgctaaccataaggccatctggttcccttacaacatggactggcgcggtcgtgtttacgctgtgtcgatgttcaacccgcaaggtaacgatatgaccaaaggactgcttacgctggcgaaaggtaaaccaatcggtaaggaaggttactactggctgaaaatccacggtgcaaactgtgcgggtgtcgataaggttccgttccctgagcgcatcaagttcattgaggaaaaccacgagaacatcatggcttgcgctaagtctccactggagaacacttggtgggctgagcaagatagtccgttccgcttccttgcgttctgctttgagtacgctggggtacagcaccacggcctgagctataactgctcccttccgctggcgtttgacgggtcttgctctggcatccagcacttctccgcgatgctccgagatgaggtaggtggtcgcgcggttaacttgcttcctagtgaaaccgttcaggacatctacgggattgttgctaagaaagtcaacgagattctacaagcagacgcaatcaatgggaccgataacgaagtagttaccgtgaccgatgagaacactggtgaaatctctgagaaagtcaagctgggcactaaggcactggctggtcaatggctggcttacggtgttactcgcagtgtgactaagcgttcagtcatgacgctggcttacgggtccaaagagttcggcttccgtcaacaagtgctgcgccacactattcagtgggctattgattccggccgtggtctgatgttcactcagccgaatcaggctgctggatacatggctaagctgatttgggaatctgtgagcgtgacggtggtagctgcggttgaagcaatgaactggcttaagtctgctgctaagctgctggctgctgaggtcaaagataagaagactggagagattcttcgcaagcgttgcgctgtgcattgggtaactcctgatggtttccctgtgtggcaggaatacaagaagcctattcagacgcgcttgaacctgatgttcctcggtcagttccgcttacagcctaccattaacaccaacaaagatagcgagattgatgcacgtaaacaggagtctggtatcgctcctaactttgtacacagccaagacggtagccaccttcgtaagactgtagtgtgggcacacgagaagtacggaatcgaatcttttgcactgattcacgactccttcggtaccattccggctgacgctgcgaacctgttcaaagcagtgcgcgaaactatggttgacacatatgagtcttgtgatgtactggctgatttctacgaccagttcgctgaccagttgcacgagtctcaattggacaaaatgccagcacttccggctaaaggtaacttgaacctccgtgacatcttagagtcggacttcgcgttcgcg

SEQ ID NO: 260 - protein, 890 aa, synthetic construct
  REGION 1..890: note = Variant of RNA polymerase
MHHHHHHMNTINIAKNDFSDIELAAIPFNTLADHYGERLAREQLALEHESYEMGEARFRKMFERQLKAGEVADNAAAKPLITTLLPKMIARINDWFEEVKAKRGKRPTAFQFLQEIKPEAVAYITIKTTLACLTSADRTTVQAVASAIGRAIEDEARFGRIRDLEAKHFKKNYEEQLNKRVGHVYKKAFMQVVEADMLSKGLLGGEAWSSWHKEDSIHVGVRCIEMLIESTGMVSLHRQNAGVVGQDSETIELAPEYAEAIATRAGALAGISPMFQPCVVPPKPWTGITGGGYWANGRRPLALVRTHSKKGLMRYEDVYMPEVYKAINIAQNTAWSINKWVLAVANVITKWKHCPVRDIPAIEREELPMKPEDIDMNPEALTAWKRAKAAVYRRDKARKSRRILLEFMLEQANKFANHKAIWFPYNMDWRGRVYAVSMFNPQGNDMTKGLLTLAKGKPIGKEGYYWLKIHGANCAGVDKVPFPERIKFIEENHENIMACAKSPLENTWWAEQDSPFRFLAFCFEYAGVQHHGLSYNCSLPLAFDGSCSGIQHFSAMLRDEVGGRAVNLLPSETVQDIYGIVAKKVNEILQADAINGTDNEVVTVTDENTGEISEKVKLGTKALAGQWLAYGVTRSVTKRSVMTLAYGSKEFGFRQQVLRHTIQWAIDSGRGLMFTQPNQAAGYMAKLIWESVSVTVVAAVEAMNWLKSAAKLLAAEVKDKKTGEILRKRCAVHWVTPDGFPVWQEYKKPIQTRLNLMFLGQFRLQPTINTNKDSEIDARKQESGIAPNFVHSQDGSHLRKTVVWAHEKYGIESFALIHDSFGTIPADAANLFKAVRETMVDTYESCDVLADFYDQFADQLHESQLDKMPALPAKGNLNLRDILESDFAFA

SEQ ID NO: 261 - DNA, 2670 bp, synthetic construct
  misc_feature 1..2670: note = Variant of RNA polymerase
  source 1..2670: mol_type = other DNA
atgcaccatcaccatcaccatatgaacacgattaacatcgctaagaacgacttctctgacatcgaactggctgctatcccgttcaacactctggctgaccattacggtgagggcttagctcgcgaacagttggcccttgagcatgagtcttacgagatgggtgaagcacgtttccgcaagatgtttgagcgtcaacttaaagctggtgaggttgcggataacgctgccgccaagcctctcatcactaccctactccctaagatgattgcacgcatcaacgactggtttgaggaagtgaaagctaagcgcggcaagcgcccgacagccttccagttcctgcaagaaatcaagccggaagccgtagcgtacatcaccattaagaccactctggcttgcctaaccagtgcggaccgtacaaccgttcaggctgtagcaagcgcaatcggtcgggccattgaggacgaggctcgcttcggtcgtatccgtgaccttgaagctaagcacttcaagaaaaactatgaggaacaactcaacaagcgcgtagggcacgtctacaagaaagcatttatgcaagttgtcgaggctgacatgctctctaagggtctactcggtggcgaggcgtggtcttcgtggcataaggaagactctattcatgtaggagtacgctgcatcgagatgctcattgagtcaaccggaatggttagcttacaccgccaaaatgctggcgtagtaggtcaagactctgagactatcgaactcgcacctgaatacgctgaggctatcgcaacccgtgcaggtgcgctggctggcatctctccgatgttccaaccttgcgtagttcctcctaagccgtggactggcattactggtggtggctattgggctaacggtcgtcgtcctctggcgctggtgcgtactcacagtaagaaaggtctgatgcgctacgaagacgtttacatgcctgaggtgtacaaagcgattaacattgcgcaaaacaccgcctggtcgatcaacaagtgggtcctggcggtcgccaacgtaatcaccaagtggaagcattgtccggtccgggacatccctgcgattgagcgtgaagaactcccgatgaaaccggaagacatcgacatgaatcctgaggctctcaccgcgtggaaacgtgctaaagctgctgtgtaccgcagagacaaggctcgcaagtctcgccgtatcttgcttgagttcatgcttgagcaagccaataagtttgctaaccataaggccatctggttcccttacaacatggactggcgcggtcgtgtttacgctgtgccgatgttcaacccgcaaggtaacgatatgaccaaaggactgcttacgctggcgaaaggtaaaccaatcggtaaggaaggttactactggctgaaaatccacggtgcaaactgtgcgggtgtcgataaggttccgttccctgagcgcatcaagttcattgaggaaaaccacgagaacatcatggcttgcgctaagtctccactggagaacacttggtgggctgagcaagatagtccgttctgcttccttgcgttctgctttgagtacgctggggtacagcaccacggcctgagctataactgctcccttccgctggcgtttgacgggtcttgctctggcatccagcacttctccgcgatgctccgagatgaggtaggtggtcgcgcggttaacttgcttcctagtgaaaccgttcaggacatctacgggattgttgctaagaaagtcaacgagattctacaagcagacgcaatcaatgggaccgataacgaagtagttaccgtgaccgatgagaacactggtgaaatctctgagaaagtcaagctgggcactaaggcactggctggtcaatggctggcttacggtgttactcgcagtgtgactaagcgttcagtcatgacgctggcttacgggtccaaagagttcggcttccgtcaacaagtgctgcgccacactattcagtgggctattgattccggcaagggtctgatgttcactcagccgaatcaggctgctggatacatggctaagctgatttgggaatctgtgagcgtgacggtggtagctgcggttgaagcaatgaactggcttaagtctgctgctaagctgctggctgctgaggtcaaagatgcgaagactggagagattcttcgcaagcgttgcgctgtgcattgggtaactcctgatggtttccctgtgtggcaggaatacaagaagcctattcagacgcgcttgaacctgatgttcctcggtcagttccgcttacagcctaccattaacaccaacaaagatagcgagattgatgcacgtaaacaggagtctggtatcgctcctaactttgtacacagccaagacggtagccaccttcgtaagactgtagtgtgggcacacgagaagtacggaatcgaatcttttgcactgattcacgactccttcggtaccattccggctgacgctgcgaacctgttcaaagcagtgcgcgaaactatggttgacacatatgagtcttgtgatgtactggctgatttctacgaccagttcgctgaccagttgcacgagtctcaattggacaaaatgccagcacttccggctaaaggtaacttgaacctccgtgacatcttagagtcggacttcgcgttcgcg

SEQ ID NO: 262 - protein, 890 aa, synthetic construct
  REGION 1..890: note = Variant of RNA polymerase
MHHHHHHMNTINIAKNDFSDIELAAIPFNTLADHYGEGLAREQLALEHESYEMGEARFRKMFERQLKAGEVADNAAAKPLITTLLPKMIARINDWFEEVKAKRGKRPTAFQFLQEIKPEAVAYITIKTTLACLTSADRTTVQAVASAIGRAIEDEARFGRIRDLEAKHFKKNYEEQLNKRVGHVYKKAFMQVVEADMLSKGLLGGEAWSSWHKEDSIHVGVRCIEMLIESTGMVSLHRQNAGVVGQDSETIELAPEYAEAIATRAGALAGISPMFQPCVVPPKPWTGITGGGYWANGRRPLALVRTHSKKGLMRYEDVYMPEVYKAINIAQNTAWSINKWVLAVANVITKWKHCPVRDIPAIEREELPMKPEDIDMNPEALTAWKRAKAAVYRRDKARKSRRILLEFMLEQANKFANHKAIWFPYNMDWRGRVYAVPMFNPQGNDMTKGLLTLAKGKPIGKEGYYWLKIHGANCAGVDKVPFPERIKFIEENHENIMACAKSPLENTWWAEQDSPFCFLAFCFEYAGVQHHGLSYNCSLPLAFDGSCSGIQHFSAMLRDEVGGRAVNLLPSETVQDIYGIVAKKVNEILQADAINGTDNEVVTVTDENTGEISEKVKLGTKALAGQWLAYGVTRSVTKRSVMTLAYGSKEFGFRQQVLRHTIQWAIDSGKGLMFTQPNQAAGYMAKLIWESVSVTVVAAVEAMNWLKSAAKLLAAEVKDAKTGEILRKRCAVHWVTPDGFPVWQEYKKPIQTRLNLMFLGQFRLQPTINTNKDSEIDARKQESGIAPNFVHSQDGSHLRKTVVWAHEKYGIESFALIHDSFGTIPADAANLFKAVRETMVDTYESCDVLADFYDQFADQLHESQLDKMPALPAKGNLNLRDILESDFAFA

SEQ ID NO: 263 - DNA, 2670 bp, synthetic construct
  misc_feature 1..2670: note = Variant of RNA polymerase
  source 1..2670: mol_type = other DNA
atgcaccatcaccatcaccatatgaacacgattaacatcgctaagaacgacttctctgacatcgaactggctgctatcccgttcaacactctggctgaccattacggtgagggcttagctcgcgaacagttggcccttgagcatgagtcttacgagatgggtgaagcacgtttccgcaagatgtttgagcgtcaacttaaagctggtgaggttgcggataacgctgccgccaagcctctcatcactaccctactccctaagatgattgcacgcatcaacgactggtttgaggaagtgaaagctaagcgcggcaagcgcccgacagccttccagttcctgcaagaaatcaagccggaagccgtagcgtacatcaccattaagaccactctggcttgcctaaccagtgcggaccgtacaaccgttcaggctgtagcaagcgcaatcggtcgggccattgaggacgaggctcgcttcggtcgtatccgtgaccttgaagctaagcacttcaagaaaaactatgaggaacaactcaacaagcgcgtagggcacgtctacaagaaagcatttatgcaagttgtcgaggcttgtatgctctctaagggtctactcggtggcgaggcgtggtcttcgtggcataaggaagactctattcatgtaggagtacgctgcatcgagatgctcattgagtcaaccggaatggttagcttacaccgccaaaatgctggcgtagtaggtcaagactctgagactatcgaactcgcacctgaatacgctgaggctatcgcaacccgtgcaggtgcgctggctggcatctctccgatgttccaaccttgcgtagttcctcctaagccgtggactggcattactggtggtggctattgggctaacggtcgtcgtcctctggcgctggtgcgtactcacagtaagaaaggtctgatgcgctacgaagacgtttacatgcctgaggtgtacaaagcgattaacattgcgcaaaacaccgcctggtcgatcaacaagtgggtcctggcggtcgccaacgtaatcaccaagtggaagcattgtccggtccgggacatccctgcgattgagcgtgaagaactcccgatgaaaccggaagacatcgacatgaatcctgaggctctcaccgcgtggaaacgtgctaaagctgctgtgtaccgcagagacaaggctcgcaagtctcgccgtatcttgcttgagttcatgcttgagcaagccaataagtttgctaaccataaggccatctggttcccttacaacatggactggcgcggtcgtgtttacgctgtgccgatgttcaacccgcaaggtaacgatatgaccaaaggactgcttacgctggcgaaaggtaaaccaatcggtaaggaaggttactactggctgaaaatccacggtgcaaactgtgcgggtgtcgataaggttccgttccctgagcgcatcaagttcattgaggaaaaccacgagaacatcatggcttgcgctaagtctccactggagaacacttggtgggctgagcaagatagtccgttctgcttccttgcgttctgctttgagtacgctggggtacagcaccacggcctgagctataactgctcccttccgctggcgtttgacgggtcttgctctggcatccagcacttctccgcgatgctccgagatgaggtaggtggtcgcgcggttaacttgcttcctagtgaaaccgttcaggacatctacgggattgttgctaagaaagtcaacgagattctacaagcagacgcaatcaatgggaccgataacgaagtagttaccgtgaccgatgagaacactggtgaaatctctgagaaagtcaagctgggcactaaggcactggctggtcaatggctggcttacggtgttactcgcagtgtgactaagcgttcagtcatgacgctggcttacgggtccaaagagttcggcttccgtcaacaagtgctgcgccacactattcagtgggctattgattccggcaagggtctgatgttcactcagccgaatcaggctgctggatacatggctaagctgatttgggaatctgtgagcgtgacggtggtagctgcggttgaagcaatgaactggcttaagtctgctgctaagctgctggctgctgaggtcaaagataagaagactggagagattcttcgcaagcgttgcgctgtgcattgggtaactcctgatggtttccctgtgtggcaggaatacaagaagcctattcagacgcgcttgaacctgatgttcctcggtcagttccgcttacagcctaccattaacaccaacaaagatagcgagattgatgcacgtaaacaggagtctggtatcgctcctaactttgtacacagccaagacggtagccaccttcgtaagactgtagtgtgggcacacgagaagtatggaatcgaatcttttgcactgattcacgactccttcggtaccattccggctgacgctgcgaacctgttcaaagcagtgcgcgaaactatggttgacacatatgagtcttgtgatgtactggctgatttctacgaccagttcgctgaccagttgcacgagtctcaattggacaaaatgccagcacttccggctaaaggtaacttgaacctccgtgacatcttagagtcggacttcgcgttcgcg

SEQ ID NO: 264 - protein, 890 aa, synthetic construct
  REGION 1..890: note = Variant of RNA polymerase
MHHHHHHMNTINIAKNDFSDIELAAIPFNTLADHYGEGLAREQLALEHESYEMGEARFRKMFERQLKAGEVADNAAAKPLITTLLPKMIARINDWFEEVKAKRGKRPTAFQFLQEIKPEAVAYITIKTTLACLTSADRTTVQAVASAIGRAIEDEARFGRIRDLEAKHFKKNYEEQLNKRVGHVYKKAFMQVVEACMLSKGLLGGEAWSSWHKEDSIHVGVRCIEMLIESTGMVSLHRQNAGVVGQDSETIELAPEYAEAIATRAGALAGISPMFQPCVVPPKPWTGITGGGYWANGRRPLALVRTHSKKGLMRYEDVYMPEVYKAINIAQNTAWSINKWVLAVANVITKWKHCPVRDIPAIEREELPMKPEDIDMNPEALTAWKRAKAAVYRRDKARKSRRILLEFMLEQANKFANHKAIWFPYNMDWRGRVYAVPMFNPQGNDMTKGLLTLAKGKPIGKEGYYWLKIHGANCAGVDKVPFPERIKFIEENHENIMACAKSPLENTWWAEQDSPFCFLAFCFEYAGVQHHGLSYNCSLPLAFDGSCSGIQHFSAMLRDEVGGRAVNLLPSETVQDIYGIVAKKVNEILQADAINGTDNEVVTVTDENTGEISEKVKLGTKALAGQWLAYGVTRSVTKRSVMTLAYGSKEFGFRQQVLRHTIQWAIDSGKGLMFTQPNQAAGYMAKLIWESVSVTVVAAVEAMNWLKSAAKLLAAEVKDKKTGEILRKRCAVHWVTPDGFPVWQEYKKPIQTRLNLMFLGQFRLQPTINTNKDSEIDARKQESGIAPNFVHSQDGSHLRKTVVWAHEKYGIESFALIHDSFGTIPADAANLFKAVRETMVDTYESCDVLADFYDQFADQLHESQLDKMPALPAKGNLNLRDILESDFAFA

SEQ ID NO: 265 - DNA, 2670 bp, synthetic construct
  misc_feature 1..2670: note = Variant of RNA polymerase
  source 1..2670: mol_type = other DNA
atgcaccatcaccatcaccatatgaacacgattaacatcgctaagaacgacttctctgacatcgaactggctgctatcccgttcaacactctggctgaccattacggtgagggcttagctcgcgaacagttggcccttgagcatgagtcttacgagatgggtgaagcacgtttccgcaagatgtttgagcgtcaacttaaagctggtgaggttgcggataacgctgccgccaagcctctcatcactaccctactccctaagatgattgcacgcatcaacgactggtttgaggaagtgaaagctaagcgcggcaagcgcccgacagccttccagttcctgcaagaaatcaagccggaagccgtagcgtacatcaccattaagaccactctggcttgcctaaccagtgcggaccgtacaaccgttcaggctgtagcaagcgcaatcggtcgggccattgaggacgaggctcgcttcggtcgtatccgtgaccttgaagctaagcacttcaagaaaaactatgaggaacaactcaacaagcgcgtagggcacgtctacaagaaagcatttatgcaagttgtcgaggctgacatgctctctaagggtctactcggtggcgaggcgtggtcttcgtggcataaggaagactctattcatgtaggagtacgctgcatcgagatgctcattgagtcaaccggaatggttagcttacaccgccaaaatgctggcgtagtaggtcaagactctgagactatcgaactcgcacctgaatacgctgaggctatcgcaacccgtgcaggtgcgctggctggcatctctccgatgttccaaccttgcgtagttcctcctaagccgtggactggcattactggtggtggctattgggctaacggtcgtcgtcctctggcgctggtgcgtactcacagtaagaaaggtctgatgcgctacgaagacgtttacatgcctgaggtgtacaaagcgattaacattgcgcaaaacaccgcctggtcgatcaacaagtgggtcctggcggtcgccaacgtaatcaccaagtggaagcattgtccggtccgggacatccctgcgattgagcgtgaagaactcccgatgaaaccggaagacatcgacatgaatcctgaggctctcaccgcgtggaaacgtgctaaagctgctgtgtaccgcagagacaaggctcgcaagtctcgccgtatcttgcttgagttcatgcttgagcaagccaataagtttgctaaccataaggccatctggttcccttacaacatggactggcgcggtcgtgtttacgctgtgccgatgttcaacccgcaaggtaacgatatgaccaaaggactgcttacgctggcgaaaggtaaaccaatcggtaaggaaggttactactggctgaaaatccacggtgcaaactgtgcgggtgtcgataaggttccgttccctgagcgcatcaagttcattgaggaaaaccacgagaacatcatggcttgcgctaagtctccactggagaacacttggtgggctgagcaagatagtccgttctgcttccttgcgttctgctttgagtacgctggggtacagcaccacggcctgagctataactgctcccttccgctggcgtttgacgggtcttgctctggcatccagcacttctccgcgatgctccgagatgaggtaggtggtcgcgcggttaacttgcttcctagtgaaaccgttcaggacatctacgggattgttgctaagaaagtcaacgagattctacaagcagacgcaatcaatgggaccgataacgaagtagttaccgtgaccgatgagaactggggtgaaatctctgagaaagtcaagctgggcactaaggcactggctggtcaatggctggcttacggtgttactcgcagtgtgactaagcgttcagtcatgacgctggcttacgggtccaaagagttcggcttccgtcaacaagtgctgcgccacactattcagtgggctattgattccggcaagggtctgatgttcactcagccgaatcaggctgctggatacatggctaagctgatttgggaatctgtgagcgtgacggtggtagctgcggttgaagcaatgaactggcttaagtctgctgctaagctgctggctgctgaggtcaaagataagaagactggagagattcttcgcaagcgttgcgctgtgcattgggtaactcctgatggtttccctgtgtggcaggaatacaagaagcctattcagacgcgcttgaacctgatgttcctcggtcagttccgcttacagcctaccattaacaccaacaaagatagcgagattgatgcacgtaaacaggagtctggtatcgctcctaactttgtacacagccaagacggtagccaccttcgtaagactgtagtgtgggcacacgagaagtacggaatcgaatcttttgcactgattcacgactccttcggtaccattccggctgacgctgcgaacctgttcaaagcagtgcgcgaaactatggttgacacatatgagtcttgtgatgtactggctgatttctacgaccagttcgctgaccagttgcacgagtctcaattggacaaaatgccagcacttccggctaaaggtaacttgaacctccgtgacatcttagagtcggacttcgcgttcgcg

SEQ ID NO: 266 - protein, 890 aa, synthetic construct
  REGION 1..890: note = Variant of RNA polymerase
MHHHHHHMNTINIAKNDFSDIELAAIPFNTLADHYGEGLAREQLALEHESYEMGEARFRKMFERQLKAGEVADNAAAKPLITTLLPKMIARINDWFEEVKAKRGKRPTAFQFLQEIKPEAVAYITIKTTLACLTSADRTTVQAVASAIGRAIEDEARFGRIRDLEAKHFKKNYEEQLNKRVGHVYKKAFMQVVEADMLSKGLLGGEAWSSWHKEDSIHVGVRCIEMLIESTGMVSLHRQNAGVVGQDSETIELAPEYAEAIATRAGALAGISPMFQPCVVPPKPWTGITGGGYWANGRRPLALVRTHSKKGLMRYEDVYMPEVYKAINIAQNTAWSINKWVLAVANVITKWKHCPVRDIPAIEREELPMKPEDIDMNPEALTAWKRAKAAVYRRDKARKSRRILLEFMLEQANKFANHKAIWFPYNMDWRGRVYAVPMFNPQGNDMTKGLLTLAKGKPIGKEGYYWLKIHGANCAGVDKVPFPERIKFIEENHENIMACAKSPLENTWWAEQDSPFCFLAFCFEYAGVQHHGLSYNCSLPLAFDGSCSGIQHFSAMLRDEVGGRAVNLLPSETVQDIYGIVAKKVNEILQADAINGTDNEVVTVTDENWGEISEKVKLGTKALAGQWLAYGVTRSVTKRSVMTLAYGSKEFGFRQQVLRHTIQWAIDSGKGLMFTQPNQAAGYMAKLIWESVSVTVVAAVEAMNWLKSAAKLLAAEVKDKKTGEILRKRCAVHWVTPDGFPVWQEYKKPIQTRLNLMFLGQFRLQPTINTNKDSEIDARKQESGIAPNFVHSQDGSHLRKTVVWAHEKYGIESFALIHDSFGTIPADAANLFKAVRETMVDTYESCDVLADFYDQFADQLHESQLDKMPALPAKGNLNLRDILESDFAFA

SEQ ID NO: 267 - DNA, 2670 bp, synthetic construct
  misc_feature 1..2670: note = Variant of RNA polymerase
  source 1..2670: mol_type = other DNA
atgcaccatcaccatcaccatatgaacacgattaacatcgctaagaacgacttctctgacatcgaactggctgctatcccgttcaacactctggctgaccattacggtgagggcttagctcgcgaacagttggcccttgagcatgagtcttacgagatgggtgaagcacgtttccgcaagatgtttgagcgtcaacttaaagctggtgaggttgcggataacgctgccgccaagcctctcatcactaccctactccctaagatgattgcacgcatcaacgactggtttgaggaagtgaaagctaagcgcggcaagcgcccgacagccttccagttcctgcaagaaatcaagccggaagccgtagcgtacatcaccattaagaccactctggcttgcctaaccagtgcggaccgtacaaccgttcaggctgtagcaagcgcaatcggtcgggccattgaggacgaggctcgcttcggtcgtatccgtgaccttgaagctaagcacttcaagaaaaactatgaggaacaactcaacaagcgcgtagggcacgtctacaagaaagcatttatgcaagttgtcgaggctgtgatgctctctaagggtctactcggtggcgaggcgtggtcttcgtggcataaggaagactctattcatgtaggagtacgctgcatcgagatgctcattgagtcaaccggaatggttagcttacaccgccaaaatgctggcgtagtaggtcaagactctgagactatcgaactcgcacctgaatacgctgaggctatcgcaacccgtgcaggtgcgctggctggcatctctccgatgttccaaccttgcgtagttcctcctaagccgtggactggcattactggtggtggctattgggctaacggtcgtcgtcctctggcgctggtgcgtactcacagtaagaaaggtctgatgcgctacgaagacgtttacatgcctgaggtgtacaaagcgattaacattgcgcaaaacaccgcctggtcgatcaacaagtgggtcctggcggtcgccaacgtaatcaccaagtggaagcattgtccggtccgggacatccctgcgattgagcgtgaagaactcccgatgaaaccggaagacatcgacatgaatcctgaggctctcaccgcgtggaaacgtgctaaagctgctgtgtaccgcagagacaaggctcgcaagtctcgccgtatcttgcttgagttcatgcttgagcaagccaataagtttgctaaccataaggccatctggttcccttacaacatggactggcgcggtcgtgtttacgctgtgccgatgttcaacccgcaaggtaacgatatgaccaaaggactgcttacgctggcgaaaggtaaaccaatcggtaaggaaggttactactggctgaaaatccacggtgcaaactgtgcgggtgtcgataaggttccgttccctgagcgcatcaagttcattgaggaaaaccacgagaacatcatggcttgcgctaagtctccactggagaacacttggtgggctgagcaagatagtccgttctgcttccttgcgttctgctttgagtacgctggggtacagcaccacggcctgagctataactgctcccttccgctggcgtttgacgggtcttgctctggcatccagcacttctccgcgatgctccgagatgaggtaggtggtcgcgcggttaacttgcttcctagtgaaaccgttcaggacatctacgggattgttgctaagaaagtcaacgagattctacaagcagacgcaatcaatgggaccgataacgaagtagttaccgtgaccgatgagaacactggtgaaatctctgagaaagtcaagctgggcactaaggcactggctggtcaatggctggcttacggtgttactcgcagtgtgactaagcgttcagtcatgacgctggcttacgggtccaaagagttcggcttccgtcaacaagtgctgcgccacactattcagtgggctattgattccggcaagggtctgatgttcactcagccgaatcaggctgctggatacatggctaagctgatttgggaatctgtgagcgtgacggtggtagctgcggttgaagcaatgaactggcttaagtctgctgctaagctgctggctgctgaggtcaaagataagaagactggagagattcttcgcaagcgttgcgctgtgcattgggtaactcctgatggtttccctgtgtggcaggaatacaagaagcctattcagacgcgcttgaacctgatgttcctcggtcagttccgcttacagcctaccattaacaccaacaaagatagcgagattgatgcacgtaaacaggagtctggtatcgctcctaactttgtacacagccaagacggtagccaccttcgtaagactgtagtgtgggcacacgagaagtacggaatcgaatcttttgcactgattcacgactccttcggtaccattccggctgacgctgcgaacctgttcaaagcagtgcgcgaaactatggttgacacatatgagtcttgtgatgtactggctgatttctacgaccagttcgctgaccagttgcacgagtctcaattggacaaaatgccagcacttccggctaaaggtaacttgaacctccgtgacatcttagagtcggacttcgcgttcgcg

SEQ ID NO: 268 - protein, 890 aa, synthetic construct
  REGION 1..890: note = Variant of RNA polymerase
MHHHHHHMNTINIAKNDFSDIELAAIPFNTLADHYGEGLAREQLALEHESYEMGEARFRKMFERQLKAGEVADNAAAKPLITTLLPKMIARINDWFEEVKAKRGKRPTAFQFLQEIKPEAVAYITIKTTLACLTSADRTTVQAVASAIGRAIEDEARFGRIRDLEAKHFKKNYEEQLNKRVGHVYKKAFMQVVEAVMLSKGLLGGEAWSSWHKEDSIHVGVRCIEMLIESTGMVSLHRQNAGVVGQDSETIELAPEYAEAIATRAGALAGISPMFQPCVVPPKPWTGITGGGYWANGRRPLALVRTHSKKGLMRYEDVYMPEVYKAINIAQNTAWSINKWVLAVANVITKWKHCPVRDIPAIEREELPMKPEDIDMNPEALTAWKRAKAAVYRRDKARKSRRILLEFMLEQANKFANHKAIWFPYNMDWRGRVYAVPMFNPQGNDMTKGLLTLAKGKPIGKEGYYWLKIHGANCAGVDKVPFPERIKFIEENHENIMACAKSPLENTWWAEQDSPFCFLAFCFEYAGVQHHGLSYNCSLPLAFDGSCSGIQHFSAMLRDEVGGRAVNLLPSETVQDIYGIVAKKVNEILQADAINGTDNEVVTVTDENTGEISEKVKLGTKALAGQWLAYGVTRSVTKRSVMTLAYGSKEFGFRQQVLRHTIQWAIDSGKGLMFTQPNQAAGYMAKLIWESVSVTVVAAVEAMNWLKSAAKLLAAEVKDKKTGEILRKRCAVHWVTPDGFPVWQEYKKPIQTRLNLMFLGQFRLQPTINTNKDSEIDARKQESGIAPNFVHSQDGSHLRKTVVWAHEKYGIESFALIHDSFGTIPADAANLFKAVRETMVDTYESCDVLADFYDQFADQLHESQLDKMPALPAKGNLNLRDILESDFAFA

SEQ ID NO: 269 - DNA, 2670 bp, synthetic construct
  misc_feature 1..2670: note = Variant of RNA polymerase
  source 1..2670: mol_type = other DNA
atgcaccatcaccatcaccatatgaacacgattaacatcgctaagaacgacttctctgacatcgaactggctgctatcccgttcaacactctggctgaccattacggtgagggcttagctcgcgaacagttggcccttgagcatgagtcttacgagatgggtgaagcacgtttccgcaagatgtttgagcgtcaacttaaagctggtgaggttgcggataacgctgccgccaagcctctcatcactaccctactccctaagatgattgcacgcatcaacgactggtttgaggaagtgaaagctaagcgcggcaagcgcccgacagccttccagttcctgcaagaaatcaagccggaagccgtagcgtacatcaccattaagaccactctggcttgcctaaccagtgcggaccgtacaaccgttcaggctgtagcaagcgcaatcggtcgggccattgaggacgaggctcgcttcggtcgtatccgtgaccttgaagctaagcacttcaagaaaaactatgaggaacaactcaacaagcgcgtagggcacgtctacaagaaagcatttatgcaagttgtcgaggctgacatgctctctaagggtctactcggtggcgaggcgtggtcttcgtggcataaggaagactctattcatgtaggagtacgctgcatcgagatgctcattgagtcaaccggaatggttagcttacaccgccaaaatgctggcgtagtaggtgtggactctgagactatcgaactcgcacctgaatacgctgaggctatcgcaacccgtgcaggtgcgctggctggcatctctccgatgttccaaccttgcgtagttcctcctaagccgtggactggcattactggtggtggctattgggctaacggtcgtcgtcctctggcgctggtgcgtactcacagtaagaaaggtctgatgcgctacgaagacgtttacatgcctgaggtgtacaaagcgattaacattgcgcaaaacaccgcctggtcgatcaacaagtgggtcctggcggtcgccaacgtaatcaccaagtggaagcattgtccggtccgggacatccctgcgattgagcgtgaagaactcccgatgaaaccggaagacatcgacatgaatcctgaggctctcaccgcgtggaaacgtgctaaagctgctgtgtaccgcagagacaaggctcgcaagtctcgccgtatcttgcttgagttcatgcttgagcaagccaataagtttgctaaccataaggccatctggttcccttacaacatggactggcgcggtcgtgtttacgctgtgccgatgttcaacccgcaaggtaacgatatgaccaaaggactgcttacgctggcgaaaggtaaaccaatcggtaaggaaggttactactggctgaaaatccacggtgcaaactgtgcgggtgtcgataaggttccgttccctgagcgcatcaagttcattgaggaaaaccacgagaacatcatggcttgcgctaagtctccactggagaacacttggtgggctgagcaagatagtccgttctgcttccttgcgttctgctttgagtacgctggggtacagcaccacggcctgagctataactgctcccttccgctggcgtttgacgggtcttgctctggcatccagcacttctccgcgatgctccgagatgaggtaggtggtcgcgcggttaacttgcttcctagtgaaaccgttcaggacatctacgggattgttgctaagaaagtcaacgagattctacaagcagacgcaatcaatgggaccgataacgaagtagttaccgtgaccgatgagaacactggtgaaatctctgagaaagtcaagctgggcactaaggcactggctggtcaatggctggcttacggtgttactcgcagtgtgactaagcgttcagtcatgacgctggcttacgggtccaaagagttcggcttccgtcaacaagtgctgcgccacactattcagtgggctattgattccggcaagggtctgatgttcactcagccgaatcaggctgctggatacatggctaagctgatttgggaatctgtgagcgtgacggtggtagctgcggttgaagcaatgaactggcttaagtctgctgctaagctgctggctgctgaggtcaaagataagaagactggagagattcttcgcaagcgttgcgctgtgcattgggtaactcctgatggtttccctgtgtggcaggaatacaagaagcctattcagacgcgcttgaacctgatgttcctcggtcagttccgcttacagcctaccattaacaccaacaaagatagcgagattgatgcacgtaaacaggagtctggtatcgctcctaactttgtacacagccaagacggtagccaccttcgtaagactgtagtgtgggcacacgagaagtacggaatcgaatcttttgcactgattcacgactccttcggtaccattccggctgacgctgcgaacctgttcaaagcagtgcgcgaaactatggttgacacatatgagtcttgtgatgtactggctgatttctacgaccagttcgctgaccagttgcacgagtctcaattggacaaaatgccagcacttccggctaaaggtaacttgaacctccgtgacatcttagagtcggacttcgcgttcgcg

SEQ ID NO: 270 - protein, 890 aa, synthetic construct
  REGION 1..890: note = Variant of RNA polymerase
MHHHHHHMNTINIAKNDFSDIELAAIPFNTLADHYGEGLAREQLALEHESYEMGEARFRKMFERQLKAGEVADNAAAKPLITTLLPKMIARINDWFEEVKAKRGKRPTAFQFLQEIKPEAVAYITIKTTLACLTSADRTTVQAVASAIGRAIEDEARFGRIRDLEAKHFKKNYEEQLNKRVGHVYKKAFMQVVEADMLSKGLLGGEAWSSWHKEDSIHVGVRCIEMLIESTGMVSLHRQNAGVVGVDSETIELAPEYAEAIATRAGALAGISPMFQPCVVPPKPWTGITGGGYWANGRRPLALVRTHSKKGLMRYEDVYMPEVYKAINIAQNTAWSINKWVLAVANVITKWKHCPVRDIPAIEREELPMKPEDIDMNPEALTAWKRAKAAVYRRDKARKSRRILLEFMLEQANKFANHKAIWFPYNMDWRGRVYAVPMFNPQGNDMTKGLLTLAKGKPIGKEGYYWLKIHGANCAGVDKVPFPERIKFIEENHENIMACAKSPLENTWWAEQDSPFCFLAFCFEYAGVQHHGLSYNCSLPLAFDGSCSGIQHFSAMLRDEVGGRAVNLLPSETVQDIYGIVAKKVNEILQADAINGTDNEVVTVTDENTGEISEKVKLGTKALAGQWLAYGVTRSVTKRSVMTLAYGSKEFGFRQQVLRHTIQWAIDSGKGLMFTQPNQAAGYMAKLIWESVSVTVVAAVEAMNWLKSAAKLLAAEVKDKKTGEILRKRCAVHWVTPDGFPVWQEYKKPIQTRLNLMFLGQFRLQPTINTNKDSEIDARKQESGIAPNFVHSQDGSHLRKTVVWAHEKYGIESFALIHDSFGTIPADAANLFKAVRETMVDTYESCDVLADFYDQFADQLHESQLDKMPALPAKGNLNLRDILESDFAFA

SEQ ID NO: 271 - DNA, 2670 bp, synthetic construct
  misc_feature 1..2670: note = Variant of RNA polymerase
  source 1..2670: mol_type = other DNA
atgcaccatcaccatcaccatatgaacacgattaacatcgctaagaacgacttctctgacatcgaactggctgctatcccgttcaacactctggctgaccattacggtgagggcttagctcgcgaacagttggcccttgagcatgagtcttacgagatgggtgaagcacgtttccgcaagatgtttgagcgtcaacttaaagctggtgaggttgcggataacgctgccgccaagcctctcatcactaccctactccctaagatgattgcacgcatcaacgactggtttgaggaagtgaaagctaagcgcggcaagcgcccgacagccttccagttcctgcaagaaatcaagccggaagccgtagcgtacatcaccattaagaccactctggcttgcctaaccagtgcggaccgtacaaccgttcaggctgtagcaagcgcaatcggtcgggccattgaggacgaggctcgcttcggtcgtatccgtgaccttgaagctaagcacttcaagaaaaactatgaggaacaactcaacaagcgcgtagggcacgtcttgaagaaagcatttatgcaagttgtcgaggctgacatgctctctaagggtctactcggtggcgaggcgtggtcttcgtggcataaggaagactctattcatgtaggagtacgctgcatcgagatgctcattgagtcaaccggaatggttagcttacaccgccaaaatgctggcgtagtaggtcaagactctgagactatcgaactcgcacctgaatacgctgaggctatcgcaacccgtgcaggtgcgctggctggcatctctccgatgttccaaccttgcgtagttcctcctaagccgtggactggcattactggtggtggctattgggctaacggtcgtcgtcctctggcgctggtgcgtactcacagtaagaaaggtctgatgcgctacgaagacgtttacatgcctgaggtgtacaaagcgattaacattgcgcaaaacaccgcctggtcgatcaacaagtgggtcctggcggtcgccaacgtaatcaccaagtggaagcattgtccggtccgggacatccctgcgattgagcgtgaagaactcccgatgaaaccggaagacatcgacatgaatcctgaggctctcaccgcgtggaaacgtgctaaagctgctgtgtaccgcagagacaaggctcgcaagtctcgccgtatcttgcttgagttcatgcttgagcaagccaataagtttgctaaccataaggccatctggttcccttacaacatggactggcgcggtcgtgtttacgctgtgccgatgttcaacccgcaaggtaacgatatgaccaaaggactgcttacgctggcgaaaggtaaaccaatcggtaaggaaggttactactggctgaaaatccacggtgcaaactgtgcgggtgtcgataaggttccgttccctgagcgcatcaagttcattgaggaaaaccacgagaacatcatggcttgcgctaagtctccactggagaacacttggtgggctgagcaagatagtccgttctgcttccttgcgttctgctttgagtacgctggggtacagcaccacggcctgagctataactgctcccttccgctggcgtttgacgggtcttgctctggcatccagcacttctccgcgatgctccgagatgaggtaggtggtcgcgcggttaacttgcttcctagtgaaaccgttcaggacatctacgggattgttgctaagaaagtcaacgagattctacaagcagacgcaatcaatgggaccgataacgaagtagttaccgtgaccgatgagaacactggtgaaatctctgagaaagtcaagctgggcactaaggcactggctggtcaatggctggcttacggtgttactcgcagtgtgactaagcgttcagtcatgacgctggcttacgggtccaaagagttcggcttccgtcaacaagtgctgcgccacactattcagtgggctattgattccggcaagggtctgatgttcactcagccgaatcaggctgctggatacatggctaagctgatttgggaatctgtgagcgtgacggtggtagctgcggttgaagcaatgaactggcttaagtctgctgctaagctgctggctgctgaggtcaaagataagaagactggagagattcttcgcaagcgttgcgctgtgcattgggtaactcctgatggtttccctgtgtggcaggaatacaagaagcctattcagacgcgcttgaacctgatgttcctcggtcagttccgcttacagcctaccattaacaccaacaaagatagcgagattgatgcacgtaaacaggagtctggtatcgctcctaactttgtacacagccaagacggtagccaccttcgtaagactgtagtgtgggcacacgagaagtacggaatcgaatcttttgcactgattcacgactccttcggtaccattccggctgacgctgcgaacctgttcaaagcagtgcgcgaaactatggttgacacatatgagtcttgtgatgtactggctgatttctacgaccagttcgctgaccagttgcacgagtctcaattggacaaaatgccagcacttccggctaaaggtaacttgaacctccgtgacatcttagagtcggacttcgcgttcgcg

SEQ ID NO: 272 - protein, 890 aa, synthetic construct
  REGION 1..890: note = Variant of RNA polymerase
MHHHHHHMNTINIAKNDFSDIELAAIPFNTLADHYGEGLAREQLALEHESYEMGEARFRKMFERQLKAGEVADNAAAKPLITTLLPKMIARINDWFEEVKAKRGKRPTAFQFLQEIKPEAVAYITIKTTLACLTSADRTTVQAVASAIGRAIEDEARFGRIRDLEAKHFKKNYEEQLNKRVGHVLKKAFMQVVEADMLSKGLLGGEAWSSWHKEDSIHVGVRCIEMLIESTGMVSLHRQNAGVVGQDSETIELAPEYAEAIATRAGALAGISPMFQPCVVPPKPWTGITGGGYWANGRRPLALVRTHSKKGLMRYEDVYMPEVYKAINIAQNTAWSINKWVLAVANVITKWKHCPVRDIPAIEREELPMKPEDIDMNPEALTAWKRAKAAVYRRDKARKSRRILLEFMLEQANKFANHKAIWFPYNMDWRGRVYAVPMFNPQGNDMTKGLLTLAKGKPIGKEGYYWLKIHGANCAGVDKVPFPERIKFIEENHENIMACAKSPLENTWWAEQDSPFCFLAFCFEYAGVQHHGLSYNCSLPLAFDGSCSGIQHFSAMLRDEVGGRAVNLLPSETVQDIYGIVAKKVNEILQADAINGTDNEVVTVTDENTGEISEKVKLGTKALAGQWLAYGVTRSVTKRSVMTLAYGSKEFGFRQQVLRHTIQWAIDSGKGLMFTQPNQAAGYMAKLIWESVSVTVVAAVEAMNWLKSAAKLLAAEVKDKKTGEILRKRCAVHWVTPDGFPVWQEYKKPIQTRLNLMFLGQFRLQPTINTNKDSEIDARKQESGIAPNFVHSQDGSHLRKTVVWAHEKYGIESFALIHDSFGTIPADAANLFKAVRETMVDTYESCDVLADFYDQFADQLHESQLDKMPALPAKGNLNLRDILESDFAFA

SEQ ID NO: 273 - DNA, 2670 bp, synthetic construct
  misc_feature 1..2670: note = Variant of RNA polymerase
  source 1..2670: mol_type = other DNA
atgcaccatcaccatcaccatatgaacacgattaacatcgctaagaacgacttctctgacatcgaactggctgctatcccgttcaacactctggctgaccattacggtgagggcttagctcgcgaacagttggcccttgagcatgagtcttacgagatgggtgaagcacgtttccgcaagatgtttgagcgtcaacttaaagctggtgaggttgcggataacgctgccgccaagcctctcatcactaccctactccctaagatgattgcacgcatcaacgactggtttgaggaagtgaaagctaagcgcggcaagcgcccgacagccttccagttcctgcaagaaatcaagccggaagccgtagcgtacatcaccattaagaccactctggcttgcctaaccagtgcggaccgtacaaccgttcaggctgtagcaagcgcaatcggtcgggccattgaggacgaggctcgcttcggtcgtatccgtgaccttgaagctaagcacttcaagaaaaactatgaggaacaactcaacaagcgcgtagggcacgtctacaagaaagcatttatgcaagttgtcgaggctgacatgctctctaagggtctactcggtggcgaggcgtggtcttcgtggcataaggaagactctattcatgtaggagtacgctgcatcgagatgctcattgagtcaaccggaatggttagcttacaccgccaaaatgctggcgtagtaggtcaagactctgagactatcgaactcgcacctgaatacgctgaggctatcgcaacccgtgcaggtgcgctggctggcatctctccgatgttccaaccttgcgtagttcctcctaagccgtggactggcattactggtggtggctattgggctaacggtcgtcgtcctctggcgctggtgcgtactcacagtaagaaaggtctgatgcgctacgaagacgtttacatgcctgaggtgtacaaagcgattaacattgcgcaaaacaccgcctggtcgatcaacaagtgggtcctggcggtcgccaacgtaatcaccaagtggaagcattgtccggtccgggacatccctgcgattgagcgtgaagaactcccgatgaaaccggaagacatcgacatgaatcctgaggctctcaccgcgtggaaacgtgctaaagctgctgtgtaccgcagagacaaggctcgcaagtctcgccgtatcttgcttgagttcatgcttgagcaagccaataagtttgctaaccataaggccatctggttcccttacaacatggactggcgcggtcgtgtttacgctgtgccgatgttcaacccgcaaggtaacgatatgaccaaaggactgcttacgctggcgaaaggtaaaccaatcggtaaggaaggttactactggctgaaaatccacggtgcaaactgtgcgggtgtcgataaggttccgttccctgagcgcatcaagttcattgaggaaaaccacgagaacatcatggcttgcgctaagtctccactggagaacacttggtgggctgagcaagatagtccgttctgcttccttgcgttctgctttgagtacgctggggtacagcaccacggcctgagctataactgctcccttccgctggcgtttgacgggtcttgctctggcatccagcacttctccgcgatgctccgagatgaggtaggtggtcgcgcggttaacttgcttcctagtgaaaccgttcaggacatctacgggattgttgctaagaaagtcaacgagattctacaagcagacgcaggtaatgggaccgataacgaagtagttaccgtgaccgatgagaacactggtgaaatctctgagaaagtcaagctgggcactaaggcactggctggtcaatggctggcttacggtgttactcgcagtgtgactaagcgttcagtcatgacgctggcttacgggtccaaagagttcggcttccgtcaacaagtgctgcgccacactattcagtgggctattgattccggcaagggtctgatgttcactcagccgaatcaggctgctggatacatggctaagctgatttgggaatctgtgagcgtgacggtggtagctgcggttgaagcaatgaactggcttaagtctgctgctaagctgctggctgctgaggtcaaagataagaagactggagagattcttcgcaagcgttgcgctgtgcattgggtaactcctgatggtttccctgtgtggcaggaatacaagaagcctattcagacgcgcttgaacctgatgttcctcggtcagttccgcttacagcctaccattaacaccaacaaagatagcgagattgatgcacgtaaacaggagtctggtatcgctcctaactttgtacacagccaagacggtagccaccttcgtaagactgtagtgtgggcacacgagaagtacggaatcgaatcttttgcactgattcacgactccttcggtaccattccggctgacgctgcgaacctgttcaaagcagtgcgcgaaactatggttgacacatatgagtcttgtgatgtactggctgatttctacgaccagttcgctgaccagttgcacgagtctcaattggacaaaatgccagcacttccggctaaaggtaacttgaacctccgtgacatcttagagtcggacttcgcgttcgcg

SEQ ID NO: 274 - protein, 890 aa, synthetic construct
  REGION 1..890: note = Variant of RNA polymerase
MHHHHHHMNTINIAKNDFSDIELAAIPFNTLADHYGEGLAREQLALEHESYEMGEARFRKMFERQLKAGEVADNAAAKPLITTLLPKMIARINDWFEEVKAKRGKRPTAFQFLQEIKPEAVAYITIKTTLACLTSADRTTVQAVASAIGRAIEDEARFGRIRDLEAKHFKKNYEEQLNKRVGHVYKKAFMQVVEADMLSKGLLGGEAWSSWHKEDSIHVGVRCIEMLIESTGMVSLHRQNAGVVGQDSETIELAPEYAEAIATRAGALAGISPMFQPCVVPPKPWTGITGGGYWANGRRPLALVRTHSKKGLMRYEDVYMPEVYKAINIAQNTAWSINKWVLAVANVITKWKHCPVRDIPAIEREELPMKPEDIDMNPEALTAWKRAKAAVYRRDKARKSRRILLEFMLEQANKFANHKAIWFPYNMDWRGRVYAVPMFNPQGNDMTKGLLTLAKGKPIGKEGYYWLKIHGANCAGVDKVPFPERIKFIEENHENIMACAKSPLENTWWAEQDSPFCFLAFCFEYAGVQHHGLSYNCSLPLAFDGSCSGIQHFSAMLRDEVGGRAVNLLPSETVQDIYGIVAKKVNEILQADAGNGTDNEVVTVTDENTGEISEKVKLGTKALAGQWLAYGVTRSVTKRSVMTLAYGSKEFGFRQQVLRHTIQWAIDSGKGLMFTQPNQAAGYMAKLIWESVSVTVVAAVEAMNWLKSAAKLLAAEVKDKKTGEILRKRCAVHWVTPDGFPVWQEYKKPIQTRLNLMFLGQFRLQPTINTNKDSEIDARKQESGIAPNFVHSQDGSHLRKTVVWAHEKYGIESFALIHDSFGTIPADAANLFKAVRETMVDTYESCDVLADFYDQFADQLHESQLDKMPALPAKGNLNLRDILESDFAFA

SEQ ID NO: 275 - DNA, 2670 bp, synthetic construct
  misc_feature 1..2670: note = Variant of RNA polymerase
  source 1..2670: mol_type = other DNA
atgcaccatcaccatcaccatatgaacacgattaacatcgctaagaacgacttctctgacatcgaactggctgctatcccgttcaacactctggctgaccattacggtgagggcttagctcgcgaacagttggcccttgagcatgagtcttacgagatgggtgaagcacgtttccgcaagatgtttgagcgtcaacttaaagctggtgaggttgcggataacgctgccgccaagcctctcatcactaccctactccctaagatgattgcacgcatcaacgactggtttgaggaagtgaaagctaagcgcggcaagcgcccgacagccttccagttcctgcaagaaatcaagccggaagccgtagcgtacatcaccattaagaccactctggcttgcctaaccagtgcggaccgtacaaccgttcaggctgtagcaagcgcaatcggtcgggccattgaggacgaggctcgcttcggtcgtatccgtgaccttgaagctaagcacttcaagaaaaactatgaggaacaactcaacaagcgcgtagggcacgtctacaagaaagcatttatgcaagttgtcgaggctgacatgctctctaagggtctactcggtggcgaggcgtggtcttcgtggtataaggaagactctattcatgtaggagtacgctgcatcgagatgctcattgagtcaaccggaatggttagcttacaccgccaaaatgctggcgtagtaggtcaagactctgagactatcgaactcgcacctgaatacgctgaggctatcgcaacccgtgcaggtgcgctggctggcatctctccgatgttccaaccttgcgtagttcctcctaagccgtggactggcattactggtggtggctattgggctaacggtcgtcgtcctctggcgctggtgcgtactcacagtaagaaaggtctgatgcgctacgaagacgtttacatgcctgaggtgtacaaagcgattaacattgcgcaaaacaccgcctggtcgatcaacaagtgggtcctggcggtcgccaacgtaatcaccaagtggaagcattgtccggtccgggacatccctgcgattgagcgtgaagaactcccgatgaaaccggaagacatcgacatgaatcctgaggctctcaccgcgtggaaacgtgctaaagctgctgtgtaccgcagagacaaggctcgcaagtctcgccgtatcttgcttgagttcatgcttgagcaagccaataagtttgctaaccataaggccatctggttcccttacaacatggactggcgcggtcgtgtttacgctgtgccgatgttcaacccgcaaggtaacgatatgaccaaaggactgcttacgctggcgaaaggtaaaccaatcggtaaggaaggttactactggctgaaaatccacggtgcaaactgtgcgggtgtcgataaggttccgttccctgagcgcatcaagttcattgaggaaaaccacgagaacatcatggcttgcgctaagtctccactggagaacacttggtgggctgagcaagatagtccgttctgcttccttgcgttctgctttgagtacgctggggtacagcaccacggcctgagctataactgctcccttccgctggcgtttgacgggtcttgctctggcatccagcacttctccgcgatgctccgagatgaggtaggtggtcgcgcggttaacttgcttcctagtgaaaccgttcaggacatctacgggattgttgctaagaaagtcaacgagattctacaagcagacgcaatcaatgggaccgataacgaagtagttaccgtgaccgatgagaacactggtgaaatctctgagaaagtcaagctgggcactaaggcactggctggtcaatggctggcttacggtgttactcgcagtgtgactaagcgttcagtcatgacgctggcttacgggtccaaagagttcggcttccgtcaacaagtgctgcgccacactattcagtgggctattgattccggcaagggtctgatgttcactcagccgaatcaggctgctggatacatggctaagctgatttgggaatctgtgagcgtgacggtggtagctgcggttgaagcaatgaactggcttaagtctgctgctaagctgctggctgctgaggtcaaagataagaagactggagagattcttcgcaagcgttgcgctgtgcattgggtaactcctgatggtttccctgtgtggcaggaatacaagaagcctattcagacgcgcttgaacctgatgttcctcggtcagttccgcttacagcctaccattaacaccaacaaagatagcgagattgatgcacgtaaacaggagtctggtatcgctcctaactttgtacacagccaagacggtagccaccttcgtaagactgtagtgtgggcacacgagaagtacggaatcgaatcttttgcactgattcacgactccttcggtaccattccggctgacgctgcgaacctgttcaaagcagtgcgcgaaactatggttgacacatatgagtcttgtgatgtactggctgatttctacgaccagttcgctgaccagttgcacgagtctcaattggacaaaatgccagcacttccggctaaaggtaacttgaacctccgtgacatcttagagtcggacttcgcgttcgcg

SEQ ID NO: 276 - protein, 890 aa, synthetic construct
  REGION 1..890: note = Variant of RNA polymerase
MHHHHHHMNTINIAKNDFSDIELAAIPFNTLADHYGEGLAREQLALEHESYEMGEARFRKMFERQLKAGEVADNAAAKPLITTLLPKMIARINDWFEEVKAKRGKRPTAFQFLQEIKPEAVAYITIKTTLACLTSADRTTVQAVASAIGRAIEDEARFGRIRDLEAKHFKKNYEEQLNKRVGHVYKKAFMQVVEADMLSKGLLGGEAWSSWYKEDSIHVGVRCIEMLIESTGMVSLHRQNAGVVGQDSETIELAPEYAEAIATRAGALAGISPMFQPCVVPPKPWTGITGGGYWANGRRPLALVRTHSKKGLMRYEDVYMPEVYKAINIAQNTAWSINKWVLAVANVITKWKHCPVRDIPAIEREELPMKPEDIDMNPEALTAWKRAKAAVYRRDKARKSRRILLEFMLEQANKFANHKAIWFPYNMDWRGRVYAVPMFNPQGNDMTKGLLTLAKGKPIGKEGYYWLKIHGANCAGVDKVPFPERIKFIEENHENIMACAKSPLENTWWAEQDSPFCFLAFCFEYAGVQHHGLSYNCSLPLAFDGSCSGIQHFSAMLRDEVGGRAVNLLPSETVQDIYGIVAKKVNEILQADAINGTDNEVVTVTDENTGEISEKVKLGTKALAGQWLAYGVTRSVTKRSVMTLAYGSKEFGFRQQVLRHTIQWAIDSGKGLMFTQPNQAAGYMAKLIWESVSVTVVAAVEAMNWLKSAAKLLAAEVKDKKTGEILRKRCAVHWVTPDGFPVWQEYKKPIQTRLNLMFLGQFRLQPTINTNKDSEIDARKQESGIAPNFVHSQDGSHLRKTVVWAHEKYGIESFALIHDSFGTIPADAANLFKAVRETMVDTYESCDVLADFYDQFADQLHESQLDKMPALPAKGNLNLRDILESDFAFA

SEQ ID NO: 277 - DNA, 2670 bp, synthetic construct
  misc_feature 1..2670: note = Variant of RNA polymerase
  source 1..2670: mol_type = other DNA
atgcaccatcaccatcaccatatgaacacgattaacatcgctaagaacgacttctctgacatcgaactggctgctatcccgttcaacactctggctgaccattacggtgagggcttagctcgcgaacagttggcccttgagcatgagtcttacgagatgggtgaagcacgtttccgcaagatgtttgagcgtcaacttaaagctggtgaggttgcggataacgctgccgccaagcctctcatcactaccctactccctaagatgattgcacgcatcaacgactggtttgaggaagtgaaagctaagcgcggcaagcgcccgacagccttccagttcctgcaagaaatcaagccggaagccgtagcgtacatcaccattaagaccactctggcttgcctaaccagtgcggaccgtacaaccgttcaggctgtagcaagcgcaatcggtcgggccattgaggacgaggctcgcttcggtcgtatccgtgaccttgaagctaagcacttcaagaaaaactatgaggaacaactcaacaagcgcgtagggcacgtctacaagaaagcatttatgcaagttgtcgaggctgacatgctctctaagggtctactcggtggcgaggcgtggtcttcgtggcataaggaagactctattcatgtaggagtacgctgcatcgagatgctcattgagtcaaccggaatggttagcttacaccgccaaaatgctggcgtagtaggtcaagactctgagactatcgaactcgcacctgaatacgctgaggctatcgcaacccgtgcaggtgcgctggctggcatctctccgatgttccaaccttgcgtagttcctcctaagccgtggactggcattactggtggtggctattgggctaacggtcgtcgtcctctggcgctggtgcgtactcacagtaagaaaggtctgatgcgctacgaagacgtttacatgcctgaggtgtacaaagcgattaacattgcgcaaaacaccgcctggtcgatcaacaagtgggtcctggcggtcgccaacgtaatcaccaagtggaagcattgtccggtccgggacatccctgcgattgagcgtgaagaactcccgatgaaaccggaagacatcgacatgaatcctgaggctctcaccgcgtggaaacgtgctaaagctgctgtgtaccgcagagacaaggctcgcaagtctcgccgtatcttgcttgagttcatgcttgagcaagccaataagtttgctaaccataaggccatctggttcccttacaacatggactggcgcggtcgtgtttacgctgtgccgatgttcaacccgcaaggtaacgatatgaccaaaggactgcttacgctggcgaaaggtaaaccaatcggtaaggaaggttactactggctgaaaatccacggtgcaaactgtgcgggtgtcgataaggttccgttccctgagcgcatcaagttcattgaggaaaaccacgggaacatcatggcttgcgctaagtctccactggagaacacttggtgggctgagcaagatagtccgttctgcttccttgcgttctgctttgagtacgctggggtacagcaccacggcctgagctataactgctcccttccgctggcgtttgacgggtcttgctctggcatccagcacttctccgcgatgctccgagatgaggtaggtggtcgcgcggttaacttgcttcctagtgaaaccgttcaggacatctacgggattgttgctaagaaagtcaacgagattctacaagcagacgcaatcaatgggaccgataacgaagtagttaccgtgaccgatgagaacactggtgaaatctctgagaaagtcaagctgggcactaaggcactggctggtcaatggctggcttacggtgttactcgcagtgtgactaagcgttcagtcatgacgctggcttacgggtccaaagagttcggcttccgtcaacaagtgctgcgccacactattcagtgggctattgattccggcaagggtctgatgttcactcagccgaatcaggctgctggatacatggctaagctgatttgggaatctgtgagcgtgacggtggtagctgcggttgaagcaatgaactggcttaagtctgctgctaagctgctggctgctgaggtcaaagataagaagactggagagattcttcgcaagcgttgcgctgtgcattgggtaactcctgatggtttccctgtgtggcaggaatacaagaagcctattcagacgcgcttgaacctgatgttcctcggtcagttccgcttacagcctaccattaacaccaacaaagatagcgagattgatgcacgtaaacaggagtctggtatcgctcctaactttgtacacagccaagacggtagccaccttcgtaagactgtagtgtgggcacacgagaagtacggaatcgaatcttttgcactgattcacgactccttcggtaccattccggctgacgctgcgaacctgttcaaagcagtgcgcgaaactatggttgacacatatgagtcttgtgatgtactggctgatttctacgaccagttcgctgaccagttgcacgagtctcaattggacaaaatgccagcacttccggctaaaggtaacttgaacctccgtgacatcttagagtcggacttcgcgttcgcg

SEQ ID NO: 278 - protein, 890 aa, synthetic construct
  REGION 1..890: note = Variant of RNA polymerase
MHHHHHHMNTINIAKNDFSDIELAAIPFNTLADHYGEGLAREQLALEHESYEMGEARFRKMFERQLKAGEVADNAAAKPLITTLLPKMIARINDWFEEVKAKRGKRPTAFQFLQEIKPEAVAYITIKTTLACLTSADRTTVQAVASAIGRAIEDEARFGRIRDLEAKHFKKNYEEQLNKRVGHVYKKAFMQVVEADMLSKGLLGGEAWSSWHKEDSIHVGVRCIEMLIESTGMVSLHRQNAGVVGQDSETIELAPEYAEAIATRAGALAGISPMFQPCVVPPKPWTGITGGGYWANGRRPLALVRTHSKKGLMRYEDVYMPEVYKAINIAQNTAWSINKWVLAVANVITKWKHCPVRDIPAIEREELPMKPEDIDMNPEALTAWKRAKAAVYRRDKARKSRRILLEFMLEQANKFANHKAIWFPYNMDWRGRVYAVPMFNPQGNDMTKGLLTLAKGKPIGKEGYYWLKIHGANCAGVDKVPFPERIKFIEENHGNIMACAKSPLENTWWAEQDSPFCFLAFCFEYAGVQHHGLSYNCSLPLAFDGSCSGIQHFSAMLRDEVGGRAVNLLPSETVQDIYGIVAKKVNEILQADAINGTDNEVVTVTDENTGEISEKVKLGTKALAGQWLAYGVTRSVTKRSVMTLAYGSKEFGFRQQVLRHTIQWAIDSGKGLMFTQPNQAAGYMAKLIWESVSVTVVAAVEAMNWLKSAAKLLAAEVKDKKTGEILRKRCAVHWVTPDGFPVWQEYKKPIQTRLNLMFLGQFRLQPTINTNKDSEIDARKQESGIAPNFVHSQDGSHLRKTVVWAHEKYGIESFALIHDSFGTIPADAANLFKAVRETMVDTYESCDVLADFYDQFADQLHESQLDKMPALPAKGNLNLRDILESDFAFA

SEQ ID NO: 279 - DNA, 2670 bp, synthetic construct
  misc_feature 1..2670: note = Variant of RNA polymerase
  source 1..2670: mol_type = other DNA
atgcaccatcaccatcaccatatgaacacgattaacatcgctaagaacgacttctctgacatcgaactggctgctatcccgttcaacactctggctgaccattacggtgagggcttagctcgcgaacagttggcccttgagcatgagtcttacgagatgggtgaagcacgtttccgcaagatgtttgagcgtcaacttaaagctggtgaggttgcggataacgctgccgccaagcctctcatcactaccctactccctaagatgattgcacgcatcaacgactggtttgaggaagtgaaagctaagcgcggcaagcgcccgacagccttccagttcctgcaagaaatcaagccggaagccgtagcgtacatcaccattaagaccactctggcttgcctaaccagtgcggaccgtacaaccgttcaggctgtagcaagcgcaatcggtcgggccattgaggacgaggctcgcttcggtcgtatccgtgaccttgaagctaagcacttcaagaaaaactatgaggaacaactcaacaagcgcgtagggcacgtctacaagaaagcatttatgcaagttgtcgaggctgctatgctctctaagggtctactcggtggcgaggcgtggtcttcgtggcataaggaagactctattcatgtaggagtacgctgcatcgagatgctcattgagtcaaccggaatggttagcttacaccgccaaaatgctggcgtagtaggtcaagactctgagactatcgaactcgcacctgaatacgctgaggctatcgcaacccgtgcaggtgcgctggctggcatctctccgatgttccaaccttgcgtagttcctcctaagccgtggactggcattactggtggtggctattgggctaacggtcgtcgtcctctggcgctggtgcgtactcacagtaagaaaggtctgatgcgctacgaagacgtttacatgcctgaggtgtacaaagcgattaacattgcgcaaaacaccgcctggtcgatcaacaagtgggtcctggcggtcgccaacgtaatcaccaagtggaagcattgtccggtccgggacatccctgcgattgagcgtgaagaactcccgatgaaaccggaagacatcgacatgaatcctgaggctctcaccgcgtggaaacgtgctaaagctgctgtgtaccgcagagacaaggctcgcaagtctcgccgtatcttgcttgagttcatgcttgagcaagccaataagtttgctaaccataaggccatctggttcccttacaacatggactggcgcggtcgtgtttacgctgtgccgatgttcaacccgcaaggtaacgatatgaccaaaggactgcttacgctggcgaaaggtaaaccaatcggtaaggaaggttactactggctgaaaatccacggtgcaaactgtgcgggtgtcgataaggttccgttccctgagcgcatcaagttcattgaggaaaaccacgagaacatcatggcttgcgctaagtctccactggagaacacttggtgggctgagcaagatagtccgttctgcttccttgcgttctgctttgagtacgctggggtacagcaccacggcctgagctataactgctcccttccgctggcgtttgacgggtcttgctctggcatccagcacttctccgcgatgctccgagatgaggtaggtggtcgcgcggttaacttgcttcctagtgaaaccgttcaggacatctacgggattgttgctaagaaagtcaacgagattctacaagcagacgcaatcaatgggaccgataacgaagtagttaccgtgaccgatgagaacactggtgaaatctctgagaaagtcaagctgggcactaaggcactggctggtcaatggctggcttacggtgttactcgcagtgtgactaagcgttcagtcatgacgctggcttacgggtccaaagagttcggcttccgtcaacaagtgctgcgccacactattcagtgggctattgattccggcaagggtctgatgttcactcagccgaatcaggctgctggatacatggctaagctgatttgggaatctgtgagcgtgacggtggtagctgcggttgaagcaatgaactggcttaagtctgctgctaagctgctggctgctgaggtcaaagataagaagactggagagattcttcgcaagcgttgcgctgtgcattgggtaactcctgatggtttccctgtgtggcaggaatacaagaagcctattcagacgcgcttgaacctgatgttcctcggtcagttccgcttacagcctaccattaacaccaacaaagatagcgagattgatgcacgtaaacaggagtctggtatcgctcctaactttgtacacagccaagacggtagccaccttcgtaagactgtagtgtgggcacacgagaagtacggaatcgaatcttttgcactgattcacgactccttcggtaccattccggctgacgctgcgaacctgttcaaagcagtgcgcgaaactatggttgacacatatgagtcttgtgatgtactggctgatttctacgaccagttcgctgaccagttgcacgagtctcaattggacaaaatgccagcacttccggctaaaggtaacttgaacctccgtgacatcttagagtcggacttcgcgttcgcg

SEQ ID NO: 280 - protein, 890 aa, synthetic construct
  REGION 1..890: note = Variant of RNA polymerase
MHHHHHHMNTINIAKNDFSDIELAAIPFNTLADHYGEGLAREQLALEHESYEMGEARFRKMFERQLKAGEVADNAAAKPLITTLLPKMIARINDWFEEVKAKRGKRPTAFQFLQEIKPEAVAYITIKTTLACLTSADRTTVQAVASAIGRAIEDEARFGRIRDLEAKHFKKNYEEQLNKRVGHVYKKAFMQVVEAAMLSKGLLGGEAWSSWHKEDSIHVGVRCIEMLIESTGMVSLHRQNAGVVGQDSETIELAPEYAEAIATRAGALAGISPMFQPCVVPPKPWTGITGGGYWANGRRPLALVRTHSKKGLMRYEDVYMPEVYKAINIAQNTAWSINKWVLAVANVITKWKHCPVRDIPAIEREELPMKPEDIDMNPEALTAWKRAKAAVYRRDKARKSRRILLEFMLEQANKFANHKAIWFPYNMDWRGRVYAVPMFNPQGNDMTKGLLTLAKGKPIGKEGYYWLKIHGANCAGVDKVPFPERIKFIEENHENIMACAKSPLENTWWAEQDSPFCFLAFCFEYAGVQHHGLSYNCSLPLAFDGSCSGIQHFSAMLRDEVGGRAVNLLPSETVQDIYGIVAKKVNEILQADAINGTDNEVVTVTDENTGEISEKVKLGTKALAGQWLAYGVTRSVTKRSVMTLAYGSKEFGFRQQVLRHTIQWAIDSGKGLMFTQPNQAAGYMAKLIWESVSVTVVAAVEAMNWLKSAAKLLAAEVKDKKTGEILRKRCAVHWVTPDGFPVWQEYKKPIQTRLNLMFLGQFRLQPTINTNKDSEIDARKQESGIAPNFVHSQDGSHLRKTVVWAHEKYGIESFALIHDSFGTIPADAANLFKAVRETMVDTYESCDVLADFYDQFADQLHESQLDKMPALPAKGNLNLRDILESDFAFA

SEQ ID NO: 281 - DNA, 2670 bp, synthetic construct
  misc_feature 1..2670: note = Variant of RNA polymerase
  source 1..2670: mol_type = other DNA
atgcaccatcaccatcaccatatgaacacgattaacatcgctaagaacgacttctctgacatcgaactggctgctatcccgttcaacactctggctgaccattacggtgagggcttagctcgcgaacagttggcccttgagcatgagtcttacgagatgggtgaagcacgtttccgcaagatgtttgagcgtcaacttaaagctggtgaggttgcggataacgctgccgccaagcctctcatcactaccctactccctaagatgattgcacgcatcaacgactggtttgaggaagtgaaagctaagcgcggcaagcgcccgacagccttccagttcctgcaagaaatcaagccggaagccgtagcgtacatcaccattaagaccactctggcttgcctaaccagtgcggaccgtacaaccgttcaggctgtagcaagcgcaatcggtcgggccattgaggacgaggctcgcttcggtcgtatccgtgaccttgaagctaagcacttcaagaaaaactatgaggaacaactcaacaagcgcgtagggcacgtctacaagaaagcatttatgcaagttgtcgaggctgacatgctctctaagggtctactcggtggcgaggcgtggtcttcgtggaggaaggaagactctattcatgtaggagtacgctgcatcgagatgctcattgagtcaaccggaatggttagcttacaccgccaaaatgctggcgtagtaggtcaagactctgagactatcgaactcgcacctgaatacgctgaggctatcgcaacccgtgcaggtgcgctggctggcatctctccgatgttccaaccttgcgtagttcctcctaagccgtggactggcattactggtggtggctattgggctaacggtcgtcgtcctctggcgctggtgcgtactcacagtaagaaaggtctgatgcgctacgaagacgtttacatgcctgaggtgtacaaagcgattaacattgcgcaaaacaccgcctggtcgatcaacaagtgggtcctggcggtcgccaacgtaatcaccaagtggaagcattgtccggtccgggacatccctgcgattgagcgtgaagaactcccgatgaaaccggaagacatcgacatgaatcctgaggctctcaccgcgtggaaacgtgctaaagctgctgtgtaccgcagagacaaggctcgcaagtctcgccgtatcttgcttgagttcatgcttgagcaagccaataagtttgctaaccataaggccatctggttcccttacaacatggactggcgcggtcgtgtttacgctgtgccgatgttcaacccgcaaggtaacgatatgaccaaaggactgcttacgctggcgaaaggtaaaccaatcggtaaggaaggttactactggctgaaaatccacggtgcaaactgtgcgggtgtcgataaggttccgttccctgagcgcatcaagttcattgaggaaaaccacgagaacatcatggcttgcgctaagtctccactggagaacacttggtgggctgagcaagatagtccgttctgcttccttgcgttctgctttgagtacgctggggtacagcaccacggcctgagctataactgctcccttccgctggcgtttgacgggtcttgctctggcatccagcacttctccgcgatgctccgagatgaggtaggtggtcgcgcggttaacttgcttcctagtgaaaccgttcaggacatctacgggattgttgctaagaaagtcaacgagattctacaagcagacgcaatcaatgggaccgataacgaagtagttaccgtgaccgatgagaacactggtgaaatctctgagaaagtcaagctgggcactaaggcactggctggtcaatggctggcttacggtgttactcgcagtgtgactaagcgttcagtcatgacgctggcttacgggtccaaagagttcggcttccgtcaacaagtgctgcgccacactattcagtgggctattgattccggcaagggtctgatgttcactcagccgaatcaggctgctggatacatggctaagctgatttgggaatctgtgagcgtgacggtggtagctgcggttgaagcaatgaactggcttaagtctgctgctaagctgctggctgctgaggtcaaagataagaagactggagagattcttcgcaagcgttgcgctgtgcattgggtaactcctgatggtttccctgtgtggcaggaatacaagaagcctattcagacgcgcttgaacctgatgttcctcggtcagttccgcttacagcctaccattaacaccaacaaagatagcgagattgatgcacgtaaacaggagtctggtatcgctcctaactttgtacacagccaagacggtagccaccttcgtaagactgtagtgtgggcacacgagaagtacggaatcgaatcttttgcactgattcacgactccttcggtaccattccggctgacgctgcgaacctgttcaaagcagtgcgcgaaactatggttgacacatatgagtcttgtgatgtactggctgatttctacgaccagttcgctgaccagttgcacgagtctcaattggacaaaatgccagcacttccggctaaaggtaacttgaacctccgtgacatcttagagtcggacttcgcgttcgcg

SEQ ID NO: 282 - protein, 890 aa, synthetic construct
  REGION 1..890: note = Variant of RNA polymerase
MHHHHHHMNTINIAKNDFSDIELAAIPFNTLADHYGEGLAREQLALEHESYEMGEARFRKMFERQLKAGEVADNAAAKPLITTLLPKMIARINDWFEEVKAKRGKRPTAFQFLQEIKPEAVAYITIKTTLACLTSADRTTVQAVASAIGRAIEDEARFGRIRDLEAKHFKKNYEEQLNKRVGHVYKKAFMQVVEADMLSKGLLGGEAWSSWRKEDSIHVGVRCIEMLIESTGMVSLHRQNAGVVGQDSETIELAPEYAEAIATRAGALAGISPMFQPCVVPPKPWTGITGGGYWANGRRPLALVRTHSKKGLMRYEDVYMPEVYKAINIAQNTAWSINKWVLAVANVITKWKHCPVRDIPAIEREELPMKPEDIDMNPEALTAWKRAKAAVYRRDKARKSRRILLEFMLEQANKFANHKAIWFPYNMDWRGRVYAVPMFNPQGNDMTKGLLTLAKGKPIGKEGYYWLKIHGANCAGVDKVPFPERIKFIEENHENIMACAKSPLENTWWAEQDSPFCFLAFCFEYAGVQHHGLSYNCSLPLAFDGSCSGIQHFSAMLRDEVGGRAVNLLPSETVQDIYGIVAKKVNEILQADAINGTDNEVVTVTDENTGEISEKVKLGTKALAGQWLAYGVTRSVTKRSVMTLAYGSKEFGFRQQVLRHTIQWAIDSGKGLMFTQPNQAAGYMAKLIWESVSVTVVAAVEAMNWLKSAAKLLAAEVKDKKTGEILRKRCAVHWVTPDGFPVWQEYKKPIQTRLNLMFLGQFRLQPTINTNKDSEIDARKQESGIAPNFVHSQDGSHLRKTVVWAHEKYGIESFALIHDSFGTIPADAANLFKAVRETMVDTYESCDVLADFYDQFADQLHESQLDKMPALPAKGNLNLRDILESDFAFA

SEQ ID NO: 283 - DNA, 2670 bp, synthetic construct
  misc_feature 1..2670: note = Variant of RNA polymerase
  source 1..2670: mol_type = other DNA
atgcaccatcaccatcaccatatgaacacgattaacatcgctaagaacgacttctctgacatcgaactggctgctatcccgttcaacactctggctgaccattacggtgagggcttagctcgcgaacagttggcccttgagcatgagtcttacgagatgggtgaagcacgtttccgcaagatgtttgagcgtcaacttaaagctggtgaggttgcggataacgctgccgccaagcctctcatcactaccctactccctaagatgattgcacgcatcaacgactggtttgaggaagtgaaagctaagcgcggcaagcgcccgacagccttccagttcctgcaagaaatcaagccggaagccgtagcgtacatcaccattaagaccactctggcttgcctaaccagtgcggaccgtacaaccgttcaggctgtagcaagcgcaatcggtcgggccattgaggacgaggctcgcttcggtcgtatccgtgaccttgaagctaagcacttcaagaaaaactatgaggaacaactcaacaagcgcgtagggcacgtctacaagaaagcatttatgcaagttgtcgaggctgacatgctctctaagggtctactcggtggcgaggcgtggtcttcgtggcataaggaagactctattcatgtaggagtacgctgcatcgagatgctcattgagtcaaccggaatggttagcttacaccgccaaaatgctggcgtagtaggtcaagactctgagactatcgaactcgcacctgaatacgctgaggctatcgcaacccgtgcaggtgcgctggctggcatctctccgatgttccaaccttgcgtagttcctcctaagccgtggactggcattactggtggtggctattgggctaacggtcgtcgtcctctggcgctggtgcgtactcacagtaagaaaggtctgatgcgctacgaagacgtttacatgcctgaggtgtacaaagcgattaacattgcgcaaaacaccgcctggtcgatcaacaagtgggtcctggcggtcgccaacgtaatcaccaagtggaagcattgtccggtccgggacatccctgcgattgagcgtgaagaactcccgatgaaaccggaagacatctttatgaatcctgaggctctcaccgcgtggaaacgtgctaaagctgctgtgtaccgcagagacaaggctcgcaagtctcgccgtatcttgcttgagttcatgcttgagcaagccaataagtttgctaaccataaggccatctggttcccttacaacatggactggcgcggtcgtgtttacgctgtgccgatgttcaacccgcaaggtaacgatatgaccaaaggactgcttacgctggcgaaaggtaaaccaatcggtaaggaaggttactactggctgaaaatccacggtgcaaactgtgcgggtgtcgataaggttccgttccctgagcgcatcaagttcattgaggaaaaccacgagaacatcatggcttgcgctaagtctccactggagaacacttggtgggctgagcaagatagtccgttctgcttccttgcgttctgctttgagtacgctggggtacagcaccacggcctgagctataactgctcccttccgctggcgtttgacgggtcttgctctggcatccagcacttctccgcgatgctccgagatgaggtaggtggtcgcgcggttaacttgcttcctagtgaaaccgttcaggacatctacgggattgttgctaagaaagtcaacgagattctacaagcagacgcaatcaatgggaccgataacgaagtagttaccgtgaccgatgagaacactggtgaaatctctgagaaagtcaagctgggcactaaggcactggctggtcaatggctggcttacggtgttactcgcagtgtgactaagcgttcagtcatgacgctggcttacgggtccaaagagttcggcttccgtcaacaagtgctgcgccacactattcagtgggctattgattccggcaagggtctgatgttcactcagccgaatcaggctgctggatacatggctaagctgatttgggaatctgtgagcgtgacggtggtagctgcggttgaagcaatgaactggcttaagtctgctgctaagctgctggctgctgaggtcaaagataagaagactggagagattcttcgcaagcgttgcgctgtgcattgggtaactcctgatggtttccctgtgtggcaggaatacaagaagcctattcagacgcgcttgaacctgatgttcctcggtcagttccgcttacagcctaccattaacaccaacaaagatagcgagattgatgcacgtaaacaggagtctggtatcgctcctaactttgtacacagccaagacggtagccaccttcgtaagactgtagtgtgggcacacgagaagtacggaatcgaatcttttgcactgattcacgactccttcggtaccattccggctgacgctgcgaacctgttcaaagcagtgcgcgaaactatggttgacacatatgagtcttgtgatgtactggctgatttctacgaccagttcgctgaccagttgcacgagtctcaattggacaaaatgccagcacttccggctaaaggtaacttgaacctccgtgacatcttagagtcggacttcgcgttcgcg

SEQ ID NO: 284 - protein, 890 aa, synthetic construct
  REGION 1..890: note = Variant of RNA polymerase
MHHHHHHMNTINIAKNDFSDIELAAIPFNTLADHYGEGLAREQLALEHESYEMGEARFRKMFERQLKAGEVADNAAAKPLITTLLPKMIARINDWFEEVKAKRGKRPTAFQFLQEIKPEAVAYITIKTTLACLTSADRTTVQAVASAIGRAIEDEARFGRIRDLEAKHFKKNYEEQLNKRVGHVYKKAFMQVVEADMLSKGLLGGEAWSSWHKEDSIHVGVRCIEMLIESTGMVSLHRQNAGVVGQDSETIELAPEYAEAIATRAGALAGISPMFQPCVVPPKPWTGITGGGYWANGRRPLALVRTHSKKGLMRYEDVYMPEVYKAINIAQNTAWSINKWVLAVANVITKWKHCPVRDIPAIEREELPMKPEDIFMNPEALTAWKRAKAAVYRRDKARKSRRILLEFMLEQANKFANHKAIWFPYNMDWRGRVYAVPMFNPQGNDMTKGLLTLAKGKPIGKEGYYWLKIHGANCAGVDKVPFPERIKFIEENHENIMACAKSPLENTWWAEQDSPFCFLAFCFEYAGVQHHGLSYNCSLPLAFDGSCSGIQHFSAMLRDEVGGRAVNLLPSETVQDIYGIVAKKVNEILQADAINGTDNEVVTVTDENTGEISEKVKLGTKALAGQWLAYGVTRSVTKRSVMTLAYGSKEFGFRQQVLRHTIQWAIDSGKGLMFTQPNQAAGYMAKLIWESVSVTVVAAVEAMNWLKSAAKLLAAEVKDKKTGEILRKRCAVHWVTPDGFPVWQEYKKPIQTRLNLMFLGQFRLQPTINTNKDSEIDARKQESGIAPNFVHSQDGSHLRKTVVWAHEKYGIESFALIHDSFGTIPADAANLFKAVRETMVDTYESCDVLADFYDQFADQLHESQLDKMPALPAKGNLNLRDILESDFAFA

SEQ ID NO: 285 - DNA, 2670 bp, synthetic construct
  misc_feature 1..2670: note = Variant of RNA polymerase
  source 1..2670: mol_type = other DNA
atgcaccatcaccatcaccatatgaacacgattaacatcgctaagaacgacttctctgacatcgaactggctgctatcccgttcaacactctggctgaccattacggtgagggcttagctcgcgaacagttggcccttgagcatgagtcttacgagatgggtgaagcacgtttccgcaagatgtttgagcgtcaacttaaagctggtgaggttgcggataacgctgccgccaagcctctcatcactaccctactccctaagatgattgcacgcatcaacgactggtttgaggaagtgaaagctaagcgcggcaagcgcccgacagccttccagttcctgcaagaaatcaagccggaagccgtagcgtacatcaccattaagaccactctggcttgcctaaccagtgcggaccgtacaaccgttcaggctgtagcaagcgcaatcggtcgggccattgaggacgaggctcgcttcggtcgtatccgtgaccttgaagctaagcacttcaagaaaaactatgaggaacaactcaacaagcgcgtagggcacgtctacaagaaagcatttatgcaagttgtcgaggctgacatgctctctaagggtctactcggtggcgaggcgtggtcttcgtggcataaggaagactctattcatgtaggagtacgctgcatcgagatgctcattgagtcaaccggaatggttagcttacaccgccaaaatgctggcgtagtaggtcaagactctgagactatcgaactcgcacctgaatacgctgaggctatcgcaacccgtgcaggtgcgctggctggcatctctccgatgttccaaccttgcgtagttcctcctaagccgtggactggcattactggtggtggctattgggctaacggtcgtcgtcctctggcgctggtgcgtactcacagtaagaaaggtctgatgcgctacgaagacgtttacatgcctgaggtgtacaaagcgattaacattgcgcaaaacaccgcctggtcgatcaacaagtgggtcctggcggtcgccaacgtaatcaccaagtggaagcattgtccggtccgggacatccctgcgattgagcgtgaagaactcccgatgaaaccggaagacatcgacatgaatcctgaggctctcaccgcgtggaaacgtgctaaagctgctgtgtaccgcagagacaaggctcgcaagtctcgccgtatcttgcttgagttcatgcttgagcaagccaataagtttgctaaccataaggccatctggttcccttacaacatggactggcgcggtcgtgtttacgctgtgccgatgttcaacccgcaaggtaacgatatgaccaaaggactgcttacgctggcgaaaggtaaaccaatcggtaaggaaggttactactggctgaaaatccacggtgcaaactgtgcgggtgtcgataaggttccgttccctgagcgcatcaagttcattgaggaaaaccacgagaacatcatggcttgcgctaagtctccactggagaacacttggtgggctgagcaagatagtccgttctgcttccttgcgttctgctttgagtacgctggggtacagcaccacggcctgagctataactgctcccttccgctggcgtttgacgggtcttgctctggcatccagcacttctccgcgatgctccgagatgaggtaggtggtcgcgcggttaacttgcttcctagtgaaaccgttcaggacatctacgggattgttgctaagaaagtcaacgagattctacaagcagacgcaatcaatgggaccgataacgaagtagttaccgtgaccgatgagaacactggtgaaatctctgagaaagtcaagctgggcactaaggcactggctggtcaatggctggcttacggtgttactcgcagtgtgactaagcgttcagtcatgacgctggcttacgggtccaaagagttcggcttccgtcaacaagtgctgcgccacactattcagtgggctattgattccggcaagggtctgatgttcactcagccgaatcaggctgctggatacatggctaagctgatttgggaatctgtgagcgtgacggtggtagctgcggttgaagcaatgaactggcttaagtctgctgctaagctgctggctgctgaggtcaaagataagacgactggagagattcttcgcaagcgttgcgctgtgcattgggtaactcctgatggtttccctgtgtggcaggaatacaagaagcctattcagacgcgcttgaacctgatgttcctcggtcagttccgcttacagcctaccattaacaccaacaaagatagcgagattgatgcacgtaaacaggagtctggtatcgctcctaactttgtacacagccaagacggtagccaccttcgtaagactgtagtgtgggcacacgagaagtacggaatcgaatcttttgcactgattcacgactccttcggtaccattccggctgacgctgcgaacctgttcaaagcagtgcgcgaaactatggttgacacatatgagtcttgtgatgtactggctgatttctacgaccagttcgctgaccagttgcacgagtctcaattggacaaaatgccagcacttccggctaaaggtaacttgaacctccgtgacatcttagagtcggacttcgcgttcgcg

SEQ ID NO: 286 - protein, 890 aa, synthetic construct
  REGION 1..890: note = Variant of RNA polymerase
MHHHHHHMNTINIAKNDFSDIELAAIPFNTLADHYGEGLAREQLALEHESYEMGEARFRKMFERQLKAGEVADNAAAKPLITTLLPKMIARINDWFEEVKAKRGKRPTAFQFLQEIKPEAVAYITIKTTLACLTSADRTTVQAVASAIGRAIEDEARFGRIRDLEAKHFKKNYEEQLNKRVGHVYKKAFMQVVEADMLSKGLLGGEAWSSWHKEDSIHVGVRCIEMLIESTGMVSLHRQNAGVVGQDSETIELAPEYAEAIATRAGALAGISPMFQPCVVPPKPWTGITGGGYWANGRRPLALVRTHSKKGLMRYEDVYMPEVYKAINIAQNTAWSINKWVLAVANVITKWKHCPVRDIPAIEREELPMKPEDIDMNPEALTAWKRAKAAVYRRDKARKSRRILLEFMLEQANKFANHKAIWFPYNMDWRGRVYAVPMFNPQGNDMTKGLLTLAKGKPIGKEGYYWLKIHGANCAGVDKVPFPERIKFIEENHENIMACAKSPLENTWWAEQDSPFCFLAFCFEYAGVQHHGLSYNCSLPLAFDGSCSGIQHFSAMLRDEVGGRAVNLLPSETVQDIYGIVAKKVNEILQADAINGTDNEVVTVTDENTGEISEKVKLGTKALAGQWLAYGVTRSVTKRSVMTLAYGSKEFGFRQQVLRHTIQWAIDSGKGLMFTQPNQAAGYMAKLIWESVSVTVVAAVEAMNWLKSAAKLLAAEVKDKTTGEILRKRCAVHWVTPDGFPVWQEYKKPIQTRLNLMFLGQFRLQPTINTNKDSEIDARKQESGIAPNFVHSQDGSHLRKTVVWAHEKYGIESFALIHDSFGTIPADAANLFKAVRETMVDTYESCDVLADFYDQFADQLHESQLDKMPALPAKGNLNLRDILESDFAFA

SEQ ID NO: 287 - DNA, 2670 bp, synthetic construct
  misc_feature 1..2670: note = Variant of RNA polymerase
  source 1..2670: mol_type = other DNA
atgcaccatcaccatcaccatatgaacacgattaacatcgctaagaacgacttctctgacatcgaactggctgctatcccgttcaacactctggctgaccattacggtgagggcttagctcgcgaacagttggcccttgagcatgagtcttacgagatgggtgaagcacgtttccgcaagatgtttgagcgtcaacttaaagctggtgaggttgcggataacgctgccgccaagcctctcatcactaccctactccctaagatgattgcacgcatcaacgactggtttgaggaagtgaaagctaagcgcggcaagcgcccgacagccttccagttcctgcaagaaatcaagccggaagccgtagcgtacatcaccattaagaccactctggcttgcctaaccagtgcggaccgtacaaccgttcaggctgtagcaagcgcaatcggtcgggccattgaggacgaggctcgcttcggtcgtatccgtgaccttgaagctaagcacttcaagaaaaactatgaggaacaactcaacaagcgcgtagggcacgtctacaagaaagcatttatgcaagttgtcgaggctgacatgctctctaagggtctactcggtggcgaggcgtggtcttcgtggcataaggaagactctattcatgtaggagtacgctgcatcgagatgctcattgagtcaaccggaatggttagcttacaccgccaaaatgctggcgtagtaggtcaagactctgagactatcgaactcgcacctgaatacgctgaggctatcgcaacccgtgcaggtgcgctggctggcatctctccgatgttccaaccttgcgtagttcctcctaagccgtggactggcattactggtggtggctattgggctaacggtcgtcgtcctctggcgctggtgcgtactcacagtaagaaaggtctgatgcgctacgaagacgtttacatgcctgaggtgtacaaagcgattaacattgcgcaaaacaccgcctggtcgatcaacaagtgggtcctggcggtcgccaacgtaatcaccaagtggaagcattgtccggtccgggacatccctgcgattgagcgtgaagaactcccgatgaaaccggaagacatcgacatgaatcctgaggctctcaccgcgtggaaacgtgctaaagctgctgtgtaccgcagagacaaggctcgcaagtctcgccgtatcttgcttgagttcatgcttgagcaagccaataagtttgctaaccataaggccatctggttcccttacaacatggactggcgcggtcgtgtttacgctgtgccgatgttcaacccgcaaggtaacgatatgaccaaaggactgcttacgctggcgaaaggtaaaccaatcggtaaggaaggttactactggctgaaaatccacggtgcaaactgtgcgggtgtcgataaggttccgttccctgagcgcatcaagttcattgaggaaaaccacgagaacatcatggcttgcgctaagtctccactggagaacacttggtgggctgagcaagatagtccgttctgcttccttgcgttctgctttgagtacgctggggtacagcaccacggcctgagctataactgctcccttccgctggcgtttgacgggtcttgctctggcatccagcacttctccgcgatgctccgagatgaggtaggtggtcgcgcggttaacttgcttcctagtgaaaccgttcaggacatctacgggattgttgctaagaaagtcaacgagattctacaagcagacgcaatcaatgggaccgataacgaagtagttaccgtgaccgatgagaacactggtgaaatctctgagaaagtcaagctgggcactaaggcactggctggtcaatggctggcttacggtgttactcgcagtgtgactaagcgttcagtcatgacgctggcttacgggtccaaagagttcggcttccgtcaacaagtgctgcgccacactattcagtgggctattgattccggcaagggtctgatgttcactcagccgaatcaggctgctggatacatggctaagctgatttgggaatctgtgagcgtgacggtggtagctgcggttgaagcaatgaactggcttaagtctgctgctaagctgctggctgctgaggtcaaagataaggctactggagagattcttcgcaagcgttgcgctgtgcattgggtaactcctgatggtttccctgtgtggcaggaatacaagaagcctattcagacgcgcttgaacctgatgttcctcggtcagttccgcttacagcctaccattaacaccaacaaagatagcgagattgatgcacgtaaacaggagtctggtatcgctcctaactttgtacacagccaagacggtagccaccttcgtaagactgtagtgtgggcacacgagaagtacggaatcgaatcttttgcactgattcacgactccttcggtaccattccggctgacgctgcgaacctgttcaaagcagtgcgcgaaactatggttgacacatatgagtcttgtgatgtactggctgatttctacgaccagttcgctgaccagttgcacgagtctcaattggacaaaatgccagcacttccggctaaaggtaacttgaacctccgtgacatcttagagtcggacttcgcgttcgcg

SEQ ID NO: 288 - protein, 890 aa, synthetic construct
  REGION 1..890: note = Variant of RNA polymerase
MHHHHHHMNTINIAKNDFSDIELAAIPFNTLADHYGEGLAREQLALEHESYEMGEARFRKMFERQLKAGEVADNAAAKPLITTLLPKMIARINDWFEEVKAKRGKRPTAFQFLQEIKPEAVAYITIKTTLACLTSADRTTVQAVASAIGRAIEDEARFGRIRDLEAKHFKKNYEEQLNKRVGHVYKKAFMQVVEADMLSKGLLGGEAWSSWHKEDSIHVGVRCIEMLIESTGMVSLHRQNAGVVGQDSETIELAPEYAEAIATRAGALAGISPMFQPCVVPPKPWTGITGGGYWANGRRPLALVRTHSKKGLMRYEDVYMPEVYKAINIAQNTAWSINKWVLAVANVITKWKHCPVRDIPAIEREELPMKPEDIDMNPEALTAWKRAKAAVYRRDKARKSRRILLEFMLEQANKFANHKAIWFPYNMDWRGRVYAVPMFNPQGNDMTKGLLTLAKGKPIGKEGYYWLKIHGANCAGVDKVPFPERIKFIEENHENIMACAKSPLENTWWAEQDSPFCFLAFCFEYAGVQHHGLSYNCSLPLAFDGSCSGIQHFSAMLRDEVGGRAVNLLPSETVQDIYGIVAKKVNEILQADAINGTDNEVVTVTDENTGEISEKVKLGTKALAGQWLAYGVTRSVTKRSVMTLAYGSKEFGFRQQVLRHTIQWAIDSGKGLMFTQPNQAAGYMAKLIWESVSVTVVAAVEAMNWLKSAAKLLAAEVKDKATGEILRKRCAVHWVTPDGFPVWQEYKKPIQTRLNLMFLGQFRLQPTINTNKDSEIDARKQESGIAPNFVHSQDGSHLRKTVVWAHEKYGIESFALIHDSFGTIPADAANLFKAVRETMVDTYESCDVLADFYDQFADQLHESQLDKMPALPAKGNLNLRDILESDFAFA

SEQ ID NO: 289 - DNA, 2670 bp, synthetic construct
  misc_feature 1..2670: note = Variant of RNA polymerase
  source 1..2670: mol_type = other DNA
atgcaccatcaccatcaccatatgaacacgattaacatcgctaagaacgacttctctgacatcgaactggctgctatcccgttcaacactctggctgaccattacggtgagggcttagctcgcgaacagttggcccttgagcatgagtcttacgagatgggtgaagcacgtttccgcaagatgtttgagcgtcaacttaaagctggtgaggttcgggataacgctgccgccaagcctctcatcactaccctactccctaagatgattgcacgcatcaacgactggtttgaggaagtgaaagctaagcgcggcaagcgcccgacagccttccagttcctgcaagaaatcaagccggaagccgtagcgtacatcaccattaagaccactctggcttgcctaaccagtgcggaccgtacaaccgttcaggctgtagcaagcgcaatcggtcgggccattgaggacgaggctcgcttcggtcgtatccgtgaccttgaagctaagcacttcaagaaaaactatgaggaacaactcaacaagcgcgtagggcacgtctacaagaaagcatttatgcaagttgtcgaggctgacatgctctctaagggtctactcggtggcgaggcgtggtcttcgtggcataaggaagactctattcatgtaggagtacgctgcatcgagatgctcattgagtcaaccggaatggttagcttacaccgccaaaatgctggcgtagtaggtcaagactctgagactatcgaactcgcacctgaatacgctgaggctatcgcaacccgtgcaggtgcgctggctggcatctctccgatgttccaaccttgcgtagttcctcctaagccgtggactggcattactggtggtggctattgggctaacggtcgtcgtcctctggcgctggtgcgtactcacagtaagaaaggtctgatgcgctacgaagacgtttacatgcctgaggtgtacaaagcgattaacattgcgcaaaacaccgcctggtcgatcaacaagtgggtcctggcggtcgccaacgtaatcaccaagtggaagcattgtccggtccgggacatccctgcgattgagcgtgaagaactcccgatgaaaccggaagacatcgacatgaatcctgaggctctcaccgcgtggaaacgtgctaaagctgctgtgtaccgcagagacaaggctcgcaagtctcgccgtatcttgcttgagttcatgcttgagcaagccaataagtttgctaaccataaggccatctggttcccttacaacatggactggcgcggtcgtgtttacgctgtgccgatgttcaacccgcaaggtaacgatatgaccaaaggactgcttacgctggcgaaaggtaaaccaatcggtaaggaaggttactactggctgaaaatccacggtgcaaactgtgcgggtgtcgataaggttccgttccctgagcgcatcaagttcattgaggaaaaccacgagaacatcatggcttgcgctaagtctccactggagaacacttggtgggctgagcaagatagtccgttctgcttccttgcgttctgctttgagtacgctggggtacagcaccacggcctgagctataactgctcccttccgctggcgtttgacgggtcttgctctggcatccagcacttctccgcgatgctccgagatgaggtaggtggtcgcgcggttaacttgcttcctagtgaaaccgttcaggacatctacgggattgttgctaagaaagtcaacgagattctacaagcagacgcaatcaatgggaccgataacgaagtagttaccgtgaccgatgagaacactggtgaaatctctgagaaagtcaagctgggcactaaggcactggctggtcaatggctggcttacggtgttactcgcagtgtgactaagcgttcagtcatgacgctggcttacgggtccaaagagttcggcttccgtcaacaagtgctgcgccacactattcagtgggctattgattccggcaagggtctgatgttcactcagccgaatcaggctgctggatacatggctaagctgatttgggaatctgtgagcgtgacggtggtagctgcggttgaagcaatgaactggcttaagtctgctgctaagctgctggctgctgaggtcaaagataagaagactggagagattcttcgcaagcgttgcgctgtgcattgggtaactcctgatggtttccctgtgtggcaggaatacaagaagcctattcagacgcgcttgaacctgatgttcctcggtcagttccgcttacagcctaccattaacaccaacaaagatagcgagattgatgcacgtaaacaggagtctggtatcgctcctaactttgtacacagccaagacggtagccaccttcgtaagactgtagtgtgggcacacgagaagtacggaatcgaatcttttgcactgattcacgactccttcggtaccattccggctgacgctgcgaacctgttcaaagcagtgcgcgaaactatggttgacacatatgagtcttgtgatgtactggctgatttctacgaccagttcgctgaccagttgcacgagtctcaattggacaaaatgccagcacttccggctaaaggtaacttgaacctccgtgacatcttagagtcggacttcgcgttcgcg

SEQ ID NO: 290 - protein, 890 aa, synthetic construct
  REGION 1..890: note = Variant of RNA polymerase
MHHHHHHMNTINIAKNDFSDIELAAIPFNTLADHYGEGLAREQLALEHESYEMGEARFRKMFERQLKAGEVRDNAAAKPLITTLLPKMIARINDWFEEVKAKRGKRPTAFQFLQEIKPEAVAYITIKTTLACLTSADRTTVQAVASAIGRAIEDEARFGRIRDLEAKHFKKNYEEQLNKRVGHVYKKAFMQVVEADMLSKGLLGGEAWSSWHKEDSIHVGVRCIEMLIESTGMVSLHRQNAGVVGQDSETIELAPEYAEAIATRAGALAGISPMFQPCVVPPKPWTGITGGGYWANGRRPLALVRTHSKKGLMRYEDVYMPEVYKAINIAQNTAWSINKWVLAVANVITKWKHCPVRDIPAIEREELPMKPEDIDMNPEALTAWKRAKAAVYRRDKARKSRRILLEFMLEQANKFANHKAIWFPYNMDWRGRVYAVPMFNPQGNDMTKGLLTLAKGKPIGKEGYYWLKIHGANCAGVDKVPFPERIKFIEENHENIMACAKSPLENTWWAEQDSPFCFLAFCFEYAGVQHHGLSYNCSLPLAFDGSCSGIQHFSAMLRDEVGGRAVNLLPSETVQDIYGIVAKKVNEILQADAINGTDNEVVTVTDENTGEISEKVKLGTKALAGQWLAYGVTRSVTKRSVMTLAYGSKEFGFRQQVLRHTIQWAIDSGKGLMFTQPNQAAGYMAKLIWESVSVTVVAAVEAMNWLKSAAKLLAAEVKDKKTGEILRKRCAVHWVTPDGFPVWQEYKKPIQTRLNLMFLGQFRLQPTINTNKDSEIDARKQESGIAPNFVHSQDGSHLRKTVVWAHEKYGIESFALIHDSFGTIPADAANLFKAVRETMVDTYESCDVLADFYDQFADQLHESQLDKMPALPAKGNLNLRDILESDFAFA

SEQ ID NO: 291 - DNA, 2670 bp, synthetic construct
  misc_feature 1..2670: note = Variant of RNA polymerase
  source 1..2670: mol_type = other DNA
atgcaccatcaccatcaccatatgaacacgattaacatcgctaagaacgacttctctgacatcgaactggctgctatcccgttcaacactctggctgaccattacggtgagggcttagctcgcgaacagttggcccttgagcatgagtcttacgagatgggtgaagcacgtttccgcaagatgtttgagcgtcaacttaaagctggtgaggttgcggataacgctgccgccaagcctctcatcactaccctactccctaagatgattgcacgcatcaacgactggtttgaggaagtgaaagctaagcgcggcaagcgcccgacagccttccagttcctgcaagaaatcaagccggaagccgtagcgtacatcaccattaagaccactctggcttgcctaaccagtgcggaccgtacaaccgttcaggctgtagcaagcgcaatcggtcgggccattgaggacgaggctcgcttcggtcgtatccgtgaccttgaagctaagcacttcaagaaaaactatgaggaacaactcaacaagcgcgtagggcacgtcattaagaaagcatttatgcaagttgtcgaggctgacatgctctctaagggtctactcggtggcgaggcgtggtcttcgtggcataaggaagactctattcatgtaggagtacgctgcatcgagatgctcattgagtcaaccggaatggttagcttacaccgccaaaatgctggcgtagtaggtcaagactctgagactatcgaactcgcacctgaatacgctgaggctatcgcaacccgtgcaggtgcgctggctggcatctctccgatgttccaaccttgcgtagttcctcctaagccgtggactggcattactggtggtggctattgggctaacggtcgtcgtcctctggcgctggtgcgtactcacagtaagaaaggtctgatgcgctacgaagacgtttacatgcctgaggtgtacaaagcgattaacattgcgcaaaacaccgcctggtcgatcaacaagtgggtcctggcggtcgccaacgtaatcaccaagtggaagcattgtccggtccgggacatccctgcgattgagcgtgaagaactcccgatgaaaccggaagacatcgacatgaatcctgaggctctcaccgcgtggaaacgtgctaaagctgctgtgtaccgcagagacaaggctcgcaagtctcgccgtatcttgcttgagttcatgcttgagcaagccaataagtttgctaaccataaggccatctggttcccttacaacatggactggcgcggtcgtgtttacgctgtgccgatgttcaacccgcaaggtaacgatatgaccaaaggactgcttacgctggcgaaaggtaaaccaatcggtaaggaaggttactactggctgaaaatccacggtgcaaactgtgcgggtgtcgataaggttccgttccctgagcgcatcaagttcattgaggaaaaccacgagaacatcatggcttgcgctaagtctccactggagaacacttggtgggctgagcaagatagtccgttctgcttccttgcgttctgctttgagtacgctggggtacagcaccacggcctgagctataactgctcccttccgctggcgtttgacgggtcttgctctggcatccagcacttctccgcgatgctccgagatgaggtaggtggtcgcgcggttaacttgcttcctagtgaaaccgttcaggacatctacgggattgttgctaagaaagtcaacgagattctacaagcagacgcaatcaatgggaccgataacgaagtagttaccgtgaccgatgagaacactggtgaaatctctgagaaagtcaagctgggcactaaggcactggctggtcaatggctggcttacggtgttactcgcagtgtgactaagcgttcagtcatgacgctggcttacgggtccaaagagttcggcttccgtcaacaagtgctgcgccacactattcagtgggctattgattccggcaagggtctgatgttcactcagccgaatcaggctgctggatacatggctaagctgatttgggaatctgtgagcgtgacggtggtagctgcggttgaagcaatgaactggcttaagtctgctgctaagctgctggctgctgaggtcaaagataagaagactggagagattcttcgcaagcgttgcgctgtgcattgggtaactcctgatggtttccctgtgtggcaggaatacaagaagcctattcagacgcgcttgaacctgatgttcctcggtcagttccgcttacagcctaccattaacaccaacaaagatagcgagattgatgcacgtaaacaggagtctggtatcgctcctaactttgtacacagccaagacggtagccaccttcgtaagactgtagtgtgggcacacgagaagtacggaatcgaatcttttgcactgattcacgactccttcggtaccattccggctgacgctgcgaacctgttcaaagcagtgcgcgaaactatggttgacacatatgagtcttgtgatgtactggctgatttctacgaccagttcgctgaccagttgcacgagtctcaattggacaaaatgccagcacttccggctaaaggtaacttgaacctccgtgacatcttagagtcggacttcgcgttcgcg

SEQ ID NO: 292 - protein, 890 aa, synthetic construct
  REGION 1..890: note = Variant of RNA polymerase
MHHHHHHMNTINIAKNDFSDIELAAIPFNTLADHYGEGLAREQLALEHESYEMGEARFRKMFERQLKAGEVADNAAAKPLITTLLPKMIARINDWFEEVKAKRGKRPTAFQFLQEIKPEAVAYITIKTTLACLTSADRTTVQAVASAIGRAIEDEARFGRIRDLEAKHFKKNYEEQLNKRVGHVIKKAFMQVVEADMLSKGLLGGEAWSSWHKEDSIHVGVRCIEMLIESTGMVSLHRQNAGVVGQDSETIELAPEYAEAIATRAGALAGISPMFQPCVVPPKPWTGITGGGYWANGRRPLALVRTHSKKGLMRYEDVYMPEVYKAINIAQNTAWSINKWVLAVANVITKWKHCPVRDIPAIEREELPMKPEDIDMNPEALTAWKRAKAAVYRRDKARKSRRILLEFMLEQANKFANHKAIWFPYNMDWRGRVYAVPMFNPQGNDMTKGLLTLAKGKPIGKEGYYWLKIHGANCAGVDKVPFPERIKFIEENHENIMACAKSPLENTWWAEQDSPFCFLAFCFEYAGVQHHGLSYNCSLPLAFDGSCSGIQHFSAMLRDEVGGRAVNLLPSETVQDIYGIVAKKVNEILQADAINGTDNEVVTVTDENTGEISEKVKLGTKALAGQWLAYGVTRSVTKRSVMTLAYGSKEFGFRQQVLRHTIQWAIDSGKGLMFTQPNQAAGYMAKLIWESVSVTVVAAVEAMNWLKSAAKLLAAEVKDKKTGEILRKRCAVHWVTPDGFPVWQEYKKPIQTRLNLMFLGQFRLQPTINTNKDSEIDARKQESGIAPNFVHSQDGSHLRKTVVWAHEKYGIESFALIHDSFGTIPADAANLFKAVRETMVDTYESCDVLADFYDQFADQLHESQLDKMPALPAKGNLNLRDILESDFAFA

SEQ ID NO: 293 - DNA, 2670 bp, synthetic construct
  misc_feature 1..2670: note = Variant of RNA polymerase
  source 1..2670: mol_type = other DNA
atgcaccatcaccatcaccatatgaacacgattaacatcgctaagaacgacttctctgacatcgaactggctgctatcccgttcaacactctggctgaccattacggtgagggcttagctcgcgaacagttggcccttgagcatgagtcttacgagatgggtgaagcacgtttccgcaagatgtttgagcgtcaacttaaagctggtgaggttgcggataacgctgccgccaagcctctcatcactaccctactccctaagatgattgcacgcatcaacgactggtttgaggaagtgaaagctaagcgcggcaagcgcccgacagccttccagttcctgcaagaaatcaagccggaagccgtagcgtacatcaccattaagaccactctggcttgcctaaccagtgcggaccgtacaaccgttcaggctgtagcaagcgcaatcggtcgggccattgaggacgaggctcgcttcggtcgtatccgtgaccttgaagctaagcacttcaagaaaaactatgaggaacaactcaacaagcgcgtagggcacgtctacaagaaagcatttatgcaagttgtcgaggctgacatgctctctaagggtctactcggtggcgaggcgtggtcttcgtggcataaggaagactctattcatgtaggagtacgctgcatcgagatgctcattgagtcaaccggaatggttagcttacaccgccaaaatgctggcgtagtaggtcaagactctgagactatcgaactcgcacctgaatacgctgaggctatcgcaacccgtgcaggtgcgctggctggcatctctccgatgttccaaccttgcgtagttcctcctaagccgtggactggcattactggtggtggctattgggctaacggtcgtcgtcctctggcgctggtgcgtactcacagtaagaaaggtctgatgcgctacgaagacgtttacatgcctgaggtgtacaaagcgattaacattgcgcaaaacaccgcctggtcgatcaacaagtgggtcctggcggtcgccaacgtaatcaccaagtggaagcattgtccggtccgggacatccctgcgattgagcgtgaagaactcccgatgaaaccggaagacatcgacatgaatcctgaggctctcaccgcgtggaaacgtgctaaagctgctgtgtaccgcagagacaaggctcgcaagtctcgccgtatcttgcttgagttcatgcttgagcaagccaataagtttgctaaccataaggccatctggttcccttacaacatggactggcgcggtcgtgtttacgctgtgccgatgttcaacccgcaaggtaacgatatgaccaaaggactgcttacgctggcgaaaggtaaaccaatcggtaaggaaggttactactggctgaaaatccacggtgcaaactgtgcgggtgtcgataaggttccgttccctgagcgcatcaagttcattgaggaaaaccacgagaacatcatggcttgcgctaagtctccactggagaacacttggtgggctgagcaagatagtccgttctgcttccttgcgttctgctttgagtacgctggggtacagcaccacggcctgagctataactgctcccttccgctggcgtttgacgggtcttgctctggcatccagcacttctccgcgatgctccgagatgaggtaggtggtcgcgcggttaacttgcttcctagtgaaaccgttcaggacatctacgggattgttgctaagaaagtcaacgagattctacaagcagacgcaatcaatgggaccgataacgaagtagttaccgtgaccgatgagaacactggtgaaatctctgagaaagtcaagctgggcactaaggcactggctggtcaatggctggcttacggtgttactcgcagtgtgactaagcgttcagtcatgacgctggcttacgggtccaaagagttcggcttccgtcaacaagtgctgcgccacactattcagtgggctattgattccggcaagggtctgatgttcactcagccgaatcaggctgctggatacatggctaagctgatttgggaatctgtgagcgtgacggtggtagctgcggttgaagcaatgaactggcttaagtctgctgctaagctgctggctgctgaggtcaaagataagtctactggagagattcttcgcaagcgttgcgctgtgcattgggtaactcctgatggtttccctgtgtggcaggaatacaagaagcctattcagacgcgcttgaacctgatgttcctcggtcagttccgcttacagcctaccattaacaccaacaaagatagcgagattgatgcacgtaaacaggagtctggtatcgctcctaactttgtacacagccaagacggtagccaccttcgtaagactgtagtgtgggcacacgagaagtacggaatcgaatcttttgcactgattcacgactccttcggtaccattccggctgacgctgcgaacctgttcaaagcagtgcgcgaaactatggttgacacatatgagtcttgtgatgtactggctgatttctacgaccagttcgctgaccagttgcacgagtctcaattggacaaaatgccagcacttccggctaaaggtaacttgaacctccgtgacatcttagagtcggacttcgcgttcgcg

SEQ ID NO: 294 - protein, 890 aa, synthetic construct
  REGION 1..890: note = Variant of RNA polymerase
MHHHHHHMNTINIAKNDFSDIELAAIPFNTLADHYGEGLAREQLALEHESYEMGEARFRKMFERQLKAGEVADNAAAKPLITTLLPKMIARINDWFEEVKAKRGKRPTAFQFLQEIKPEAVAYITIKTTLACLTSADRTTVQAVASAIGRAIEDEARFGRIRDLEAKHFKKNYEEQLNKRVGHVYKKAFMQVVEADMLSKGLLGGEAWSSWHKEDSIHVGVRCIEMLIESTGMVSLHRQNAGVVGQDSETIELAPEYAEAIATRAGALAGISPMFQPCVVPPKPWTGITGGGYWANGRRPLALVRTHSKKGLMRYEDVYMPEVYKAINIAQNTAWSINKWVLAVANVITKWKHCPVRDIPAIEREELPMKPEDIDMNPEALTAWKRAKAAVYRRDKARKSRRILLEFMLEQANKFANHKAIWFPYNMDWRGRVYAVPMFNPQGNDMTKGLLTLAKGKPIGKEGYYWLKIHGANCAGVDKVPFPERIKFIEENHENIMACAKSPLENTWWAEQDSPFCFLAFCFEYAGVQHHGLSYNCSLPLAFDGSCSGIQHFSAMLRDEVGGRAVNLLPSETVQDIYGIVAKKVNEILQADAINGTDNEVVTVTDENTGEISEKVKLGTKALAGQWLAYGVTRSVTKRSVMTLAYGSKEFGFRQQVLRHTIQWAIDSGKGLMFTQPNQAAGYMAKLIWESVSVTVVAAVEAMNWLKSAAKLLAAEVKDKSTGEILRKRCAVHWVTPDGFPVWQEYKKPIQTRLNLMFLGQFRLQPTINTNKDSEIDARKQESGIAPNFVHSQDGSHLRKTVVWAHEKYGIESFALIHDSFGTIPADAANLFKAVRETMVDTYESCDVLADFYDQFADQLHESQLDKMPALPAKGNLNLRDILESDFAFA

SEQ ID NO: 295 - DNA, 2670 bp, synthetic construct
  misc_feature 1..2670: note = Variant of RNA polymerase
  source 1..2670: mol_type = other DNA
atgcaccatcaccatcaccatatgaacacgattaacatcgctaagaacgacttctctgacatcgaactggctgctatcccgttcaacactctggctgaccattacggtgagggcttagctcgcgaacagttggcccttgagcatgagtcttacgagatgggtgaagcacgtttccgcaagatgtttgagcgtcaacttaaagctggtgaggttgcggataacgctgccgccaagcctctcatcactaccctactccctaagatgattgcacgcatcaacgactggtttgaggaagtgaaagctaagcgcggcaagcgcccgacagccttccagttcctgcaagaaatcaagccggaagccgtagcgtacatcaccattaagaccactctggcttgcctaaccagtgcggaccgtacaaccgttcaggctgtagcaagcgcaatcggtcgggccattgaggacgaggctcgcttcggtcgtatccgtgaccttgaagctaagcacttcaagaaaaactatgaggaacaactcaacaagcgcgtagggcacgtctacaagaaagcatttatgcaagttgtcgaggctgacatgctctctaagggtctactcggtggcgaggcgtggtcttcgtggcataaggaagactctattcatgtaggagtacgctgcatcgagatgctcattgagtcaaccggaatggttagcttacaccgccaaaatgctggcgtagtaggtcaagactctgagactatcgaactcgcacctgaatacgctgaggctatcgcaacccgtgcaggtgcgctggctggcatctctccgatgttccaaccttgcgtagttcctcctaagccgtggactggcattactggtggtggctattgggctaacggtcgtcgtcctctggcgctggtgcgtactcacagtaagaaaggtctgatgcgctacgaagacgtttacatgcctgaggtgtacaaagcgattaacattgcgcaaaacaccgcctggtcgatcaacaagtgggtcctggcggtcgccaacgtaatcaccaagtggaagcattgtccggtccgggacatccctgcgattgagcgtgaagaactcccgatgaaaccggaagacatcgacatgaatcctgaggctctcaccgcgtggaaacgtgctaaagctgctgtgtaccgcagagacaaggctcgcaagtctcgccgtatcttgcttgagttcatgcttgagcaagccaataagtttgctaaccataaggccatctggttcccttacaacatggactggcgcggtcgtgtttacgctgtgccgatgttcaacccgcaaggtaacgatatgaccaaaggactgcttacgctggcgaaaggtaaaccaatcggtaaggaaggttactactggctgaaaatccacggtgcaaactgtgcgggtgtcgataaggttccgttccctgagcgcatcaagttcattgaggaaaaccacgagaacatcatggcttgcgctaagtctccactggagaacacttggtgggctgagcaagatagtccgttctgcttccttgcgttctgctttgagtacgctggggtacagcaccacggcctgagctataactgctcccttccgctggcgtttgacgggtcttgctctggcatccagcacttctccgcgatgctccgagatgaggtaggtggtcgcgcggttaacttgcttcctagtgaaaccgttcaggacatctacgggattgttgctaagaaagtcaacgagattctacaagcagacgcaatcaatgggaccgataacgaagtagttaccgtgaccgatgagaacactggtgaaatctctgagaaagtcaagctgggcactaaggcactggctggtcaatggctggcttacggtgttactcgcagtgtgactaagcgttcagtcatgacgctggcttacgggtccaaagagttcggcttccgtcaacaagtgctgcgccacactattcagtgggctattgattccggcaagggtctgatgttcactcagccgaatcaggctgctggatacatggctaagctgatttgggaatctgtgagcgtgacggtggtagctgcggttgaagcaatgaactggcttaagtctgctgctaagctgctggctgctgaggtcaaagataagaagactggagagattcttcgcaagcgttgcgctgtgcattgggtaactcctgatggtttccctgtgtggcaggaatacaagaagcctattcagacgcgcttgaacctgatgttcctcggtcagttccgcttacagcctaccattaacaccaacaaagatagcgagattgatgcacgtaaacaggagtctggtatcgctcctaactttgtacacagccaagacggtagccaccttcgtaagactgtagtgtgggcacacgagaagtacggaatcgaatcttttgcactgattcacgactccttcggtaccattccggctgacgctgcgaacctgttcaaagcagtgcgcgaaactatggttgacacatatgagtcttgtgatgtactggctgatttctacgaccagttcgctgaccagttgcacgagtctcaattggaccagatgccagcacttccggctaaaggtaacttgaacctccgtgacatcttagagtcggacttcgcgttcgcg

SEQ ID NO: 296 - protein, 890 aa, synthetic construct
  REGION 1..890: note = Variant of RNA polymerase
MHHHHHHMNTINIAKNDFSDIELAAIPFNTLADHYGEGLAREQLALEHESYEMGEARFRKMFERQLKAGEVADNAAAKPLITTLLPKMIARINDWFEEVKAKRGKRPTAFQFLQEIKPEAVAYITIKTTLACLTSADRTTVQAVASAIGRAIEDEARFGRIRDLEAKHFKKNYEEQLNKRVGHVYKKAFMQVVEADMLSKGLLGGEAWSSWHKEDSIHVGVRCIEMLIESTGMVSLHRQNAGVVGQDSETIELAPEYAEAIATRAGALAGISPMFQPCVVPPKPWTGITGGGYWANGRRPLALVRTHSKKGLMRYEDVYMPEVYKAINIAQNTAWSINKWVLAVANVITKWKHCPVRDIPAIEREELPMKPEDIDMNPEALTAWKRAKAAVYRRDKARKSRRILLEFMLEQANKFANHKAIWFPYNMDWRGRVYAVPMFNPQGNDMTKGLLTLAKGKPIGKEGYYWLKIHGANCAGVDKVPFPERIKFIEENHENIMACAKSPLENTWWAEQDSPFCFLAFCFEYAGVQHHGLSYNCSLPLAFDGSCSGIQHFSAMLRDEVGGRAVNLLPSETVQDIYGIVAKKVNEILQADAINGTDNEVVTVTDENTGEISEKVKLGTKALAGQWLAYGVTRSVTKRSVMTLAYGSKEFGFRQQVLRHTIQWAIDSGKGLMFTQPNQAAGYMAKLIWESVSVTVVAAVEAMNWLKSAAKLLAAEVKDKKTGEILRKRCAVHWVTPDGFPVWQEYKKPIQTRLNLMFLGQFRLQPTINTNKDSEIDARKQESGIAPNFVHSQDGSHLRKTVVWAHEKYGIESFALIHDSFGTIPADAANLFKAVRETMVDTYESCDVLADFYDQFADQLHESQLDQMPALPAKGNLNLRDILESDFAFA

SEQ ID NO: 297 - DNA, 2670 bp, synthetic construct
  misc_feature 1..2670: note = Variant of RNA polymerase
  source 1..2670: mol_type = other DNA
atgcaccatcaccatcaccatatgaacacgattaacatcgctaagaacgacttctctgacatcgaactggctgctatcccgttcaacactctggctgaccattacggtgagggcttagctcgcgaacagttggcccttgagcatgagtcttacgagatgggtgaagcacgtttccgcaagatgtttgagcgtcaacttaaagctggtgaggttgcggataacgctgccgccaagcctctcatcactaccctactccctaagatgattgcacgcatcaacgactggtttgaggaagtgaaagctaagcgcggcaagcgcccgacagccttccagttcctgcaagaaatcaagccggaagccgtagcgtacatcaccattaagaccactctggcttgcctaaccagtgcggaccgtacaaccgttcaggctgtagcaagcgcaatcggtcgggccattgaggacgaggctcgcttcggtcgtatccgtgaccttgaagctaagcacttcaagaaaaactatgaggaacaactcaacaagcgcgtagggcacgtctacaagaaagcatttatgcaagttgtcgaggctgacatgctctctaagggtctactcggtggcgaggcgtggtcttcgtggcataaggaagactctattcatgtaggagtacgctgcatcgagatgctcattgagtcaaccggaatggttagcttacaccgccaaaatgctggcgtagtaggtcaagactctgagactatcgaactcgcacctgaatacgctgaggctatcgcaacccgtgcaggtgcgctggctggcatctctccgatgttccaaccttgcgtagttcctcctaagccgtggactggcattactggtggtggctattgggctaacggtcgtcgtcctctggcgctggtgcgtactcacagtaagaaaggtctgatgcgctacgaagacgtttacatgcctgaggtgtacaaagcgattaacattgcgcaaaacaccgcctggtcgatcaacaagtgggtcctggcggtcgccaacgtaatcaccaagtggaagcattgtccggtccgggacatccctgcgattgagcgtgaagaactcccgatgaaaccggaagacatcgacatgaatcctgaggctctcaccgcgtggaaacgtgctaaagctgctgtgtaccgcagagacaaggctcgcaagtctcgccgtatcttgcttgagttcatgcttgagcaagccaataagtttgctaaccataaggccatctggttcccttacaacatggactggcgcggtcgtgtttacgctgtgccgatgttcaacccgcaaggtaacgatatgaccaaaggactgcttacgctggcgaaaggtaaaccaatcggtaaggaaggttactactggctgaaaatccacggtgcaaactgtgcgggtgtcgataaggttccgttccctgagcgcatcaagttcattgaggaaaaccacgagaacatcatggcttgcgctaagtctccactggagaacacttggtgggctgagcaagatagtccgttctgcttccttgcgttctgctttgagtacgctggggtacagcaccacggcctgagctataactgctcccttccgctggcgtttgacgggtcttgctctggcatccagcacttctccgcgatgctccgagatgaggtaggtggtcgcgcggttaacttgcttcctagtgaaaccgttcaggacatctacgggattgttgctaagaaagtcaacgagattctacaagcagacgcaatcaatgggaccgataacgaagtagttaccgtgaccgatgagaacactggtgaaatctctgagaaagtcaagctgggcactaaggcactggctggtcaatggctggcttacggtgttactcgcagtgtgactaagcgttcagtcatgacgctggcttacgggtccaaagagttcggcttccgtcaacaagtgctgcgccacactattcagtgggctattgattccggcaagggtctgatgttcactcagccgaatcaggctgctggatacatggctaagctgatttgggaatctgtgagcgtgacggtggtagctgcggttgaagcaatgaactggcttaagtctgctgctaagctgctggctgctgaggtcaaagataagtatactggagagattcttcgcaagcgttgcgctgtgcattgggtaactcctgatggtttccctgtgtggcaggaatacaagaagcctattcagacgcgcttgaacctgatgttcctcggtcagttccgcttacagcctaccattaacaccaacaaagatagcgagattgatgcacgtaaacaggagtctggtatcgctcctaactttgtacacagccaagacggtagccaccttcgtaagactgtagtgtgggcacacgagaagtacggaatcgaatcttttgcactgattcacgactccttcggtaccattccggctgacgctgcgaacctgttcaaagcagtgcgcgaaactatggttgacacatatgagtcttgtgatgtactggctgatttctacgaccagttcgctgaccagttgcacgagtctcaattggacaaaatgccagcacttccggctaaaggtaacttgaacctccgtgacatcttagagtcggacttcgcgttcgcg

SEQ ID NO: 298 - protein, 890 aa, synthetic construct
  REGION 1..890: note = Variant of RNA polymerase
MHHHHHHMNTINIAKNDFSDIELAAIPFNTLADHYGEGLAREQLALEHESYEMGEARFRKMFERQLKAGEVADNAAAKPLITTLLPKMIARINDWFEEVKAKRGKRPTAFQFLQEIKPEAVAYITIKTTLACLTSADRTTVQAVASAIGRAIEDEARFGRIRDLEAKHFKKNYEEQLNKRVGHVYKKAFMQVVEADMLSKGLLGGEAWSSWHKEDSIHVGVRCIEMLIESTGMVSLHRQNAGVVGQDSETIELAPEYAEAIATRAGALAGISPMFQPCVVPPKPWTGITGGGYWANGRRPLALVRTHSKKGLMRYEDVYMPEVYKAINIAQNTAWSINKWVLAVANVITKWKHCPVRDIPAIEREELPMKPEDIDMNPEALTAWKRAKAAVYRRDKARKSRRILLEFMLEQANKFANHKAIWFPYNMDWRGRVYAVPMFNPQGNDMTKGLLTLAKGKPIGKEGYYWLKIHGANCAGVDKVPFPERIKFIEENHENIMACAKSPLENTWWAEQDSPFCFLAFCFEYAGVQHHGLSYNCSLPLAFDGSCSGIQHFSAMLRDEVGGRAVNLLPSETVQDIYGIVAKKVNEILQADAINGTDNEVVTVTDENTGEISEKVKLGTKALAGQWLAYGVTRSVTKRSVMTLAYGSKEFGFRQQVLRHTIQWAIDSGKGLMFTQPNQAAGYMAKLIWESVSVTVVAAVEAMNWLKSAAKLLAAEVKDKYTGEILRKRCAVHWVTPDGFPVWQEYKKPIQTRLNLMFLGQFRLQPTINTNKDSEIDARKQESGIAPNFVHSQDGSHLRKTVVWAHEKYGIESFALIHDSFGTIPADAANLFKAVRETMVDTYESCDVLADFYDQFADQLHESQLDKMPALPAKGNLNLRDILESDFAFA

SEQ ID NO: 299 - DNA, 2670 bp, synthetic construct
  misc_feature 1..2670: note = Variant of RNA polymerase
  source 1..2670: mol_type = other DNA
atgcaccatcaccatcaccatatgaacacgattaacatcgctaagaacgacttctctgacatcgaactggctgctatcccgttcaacactctggctgaccattacggtgagggcttagctcgcgaacagttggcccttgagcatgagtcttacgagatgggtgaagcacgtttccgcaagatgtttgagcgtcaacttaaagctggtgaggttgcggataacgctgccgccaagcctctcatcactaccctactccctaagatgattgcacgcatcaacgactggtttgaggaagtgaaagctaagcgcggcaagcgcccgacagccttccagttcctgcaagaaatcaagccggaagccgtagcgtacatcaccattaagaccactctggcttgcctaaccagtgcggaccgtacaaccgttcaggctgtagcaagcgcaatcggtcgggccattgaggacgaggctcgcttcggttttatccgtgaccttgaagctaagcacttcaagaaaaactatgaggaacaactcaacaagcgcgtagggcacgtctacaagaaagcatttatgcaagttgtcgaggctgacatgctctctaagggtctactcggtggcgaggcgtggtcttcgtggcataaggaagactctattcatgtaggagtacgctgcatcgagatgctcattgagtcaaccggaatggttagcttacaccgccaaaatgctggcgtagtaggtcaagactctgagactatcgaactcgcacctgaatacgctgaggctatcgcaacccgtgcaggtgcgctggctggcatctctccgatgttccaaccttgcgtagttcctcctaagccgtggactggcattactggtggtggctattgggctaacggtcgtcgtcctctggcgctggtgcgtactcacagtaagaaaggtctgatgcgctacgaagacgtttacatgcctgaggtgtacaaagcgattaacattgcgcaaaacaccgcctggtcgatcaacaagtgggtcctggcggtcgccaacgtaatcaccaagtggaagcattgtccggtccgggacatccctgcgattgagcgtgaagaactcccgatgaaaccggaagacatcgacatgaatcctgaggctctcaccgcgtggaaacgtgctaaagctgctgtgtaccgcagagacaaggctcgcaagtctcgccgtatcttgcttgagttcatgcttgagcaagccaataagtttgctaaccataaggccatctggttcccttacaacatggactggcgcggtcgtgtttacgctgtgccgatgttcaacccgcaaggtaacgatatgaccaaaggactgcttacgctggcgaaaggtaaaccaatcggtaaggaaggttactactggctgaaaatccacggtgcaaactgtgcgggtgtcgataaggttccgttccctgagcgcatcaagttcattgaggaaaaccacgagaacatcatggcttgcgctaagtctccactggagaacacttggtgggctgagcaagatagtccgttctgcttccttgcgttctgctttgagtacgctggggtacagcaccacggcctgagctataactgctcccttccgctggcgtttgacgggtcttgctctggcatccagcacttctccgcgatgctccgagatgaggtaggtggtcgcgcggttaacttgcttcctagtgaaaccgttcaggacatctacgggattgttgctaagaaagtcaacgagattctacaagcagacgcaatcaatgggaccgataacgaagtagttaccgtgaccgatgagaacactggtgaaatctctgagaaagtcaagctgggcactaaggcactggctggtcaatggctggcttacggtgttactcgcagtgtgactaagcgttcagtcatgacgctggcttacgggtccaaagagttcggcttccgtcaacaagtgctgcgccacactattcagtgggctattgattccggcaagggtctgatgttcactcagccgaatcaggctgctggatacatggctaagctgatttgggaatctgtgagcgtgacggtggtagctgcggttgaagcaatgaactggcttaagtctgctgctaagctgctggctgctgaggtcaaagataagaagactggagagattcttcgcaagcgttgcgctgtgcattgggtaactcctgatggtttccctgtgtggcaggaatacaagaagcctattcagacgcgcttgaacctgatgttcctcggtcagttccgcttacagcctaccattaacaccaacaaagatagcgagattgatgcacgtaaacaggagtctggtatcgctcctaactttgtacacagccaagacggtagccaccttcgtaagactgtagtgtgggcacacgagaagtacggaatcgaatcttttgcactgattcacgactccttcggtaccattccggctgacgctgcgaacctgttcaaagcagtgcgcgaaactatggttgacacatatgagtcttgtgatgtactggctgatttctacgaccagttcgctgaccagttgcacgagtctcaattggacaaaatgccagcacttccggctaaaggtaacttgaacctccgtgacatcttagagtcggacttcgcgttcgcg

SEQ ID NO: 300 - protein, 890 aa, synthetic construct
  REGION 1..890: note = Variant of RNA polymerase
MHHHHHHMNTINIAKNDFSDIELAAIPFNTLADHYGEGLAREQLALEHESYEMGEARFRKMFERQLKAGEVADNAAAKPLITTLLPKMIARINDWFEEVKAKRGKRPTAFQFLQEIKPEAVAYITIKTTLACLTSADRTTVQAVASAIGRAIEDEARFGFIRDLEAKHFKKNYEEQLNKRVGHVYKKAFMQVVEADMLSKGLLGGEAWSSWHKEDSIHVGVRCIEMLIESTGMVSLHRQNAGVVGQDSETIELAPEYAEAIATRAGALAGISPMFQPCVVPPKPWTGITGGGYWANGRRPLALVRTHSKKGLMRYEDVYMPEVYKAINIAQNTAWSINKWVLAVANVITKWKHCPVRDIPAIEREELPMKPEDIDMNPEALTAWKRAKAAVYRRDKARKSRRILLEFMLEQANKFANHKAIWFPYNMDWRGRVYAVPMFNPQGNDMTKGLLTLAKGKPIGKEGYYWLKIHGANCAGVDKVPFPERIKFIEENHENIMACAKSPLENTWWAEQDSPFCFLAFCFEYAGVQHHGLSYNCSLPLAFDGSCSGIQHFSAMLRDEVGGRAVNLLPSETVQDIYGIVAKKVNEILQADAINGTDNEVVTVTDENTGEISEKVKLGTKALAGQWLAYGVTRSVTKRSVMTLAYGSKEFGFRQQVLRHTIQWAIDSGKGLMFTQPNQAAGYMAKLIWESVSVTVVAAVEAMNWLKSAAKLLAAEVKDKKTGEILRKRCAVHWVTPDGFPVWQEYKKPIQTRLNLMFLGQFRLQPTINTNKDSEIDARKQESGIAPNFVHSQDGSHLRKTVVWAHEKYGIESFALIHDSFGTIPADAANLFKAVRETMVDTYESCDVLADFYDQFADQLHESQLDKMPALPAKGNLNLRDILESDFAFA

SEQ ID NO: 301 - DNA, 2670 bp, synthetic construct
  misc_feature 1..2670: note = Variant of RNA polymerase
  source 1..2670: mol_type = other DNA
atgcaccatcaccatcaccatatgaacacgattaacatcgctaagaacgacttctctgacatcgaactggctgctatcccgttcaacactctggctgaccattacggtgagggcttagctcgcgaacagttggcccttgagcatgagtcttacgagatgggtgaagcacgtttccgcaagatgtttgagcgtcaacttaaagctggtgaggttgcggataacgctgccgccaagcctctcatcactaccctactccctaagatgattgcacgcatcaacgactggtttgaggaagtgaaagctaagcgcggcaagcgcccgacagccttccagttcctgcaagaaatcaagccggaagccgtagcgtacatcaccattaagaccactctggcttgcctaaccagtgcggaccgtacaaccgttcaggctgtagcaagcgcaatcggtcgggccattgaggacgaggctcgcttcggtcgtatccgtgaccttgaagctaagcacttcaagaaaaactatgaggaacaactcaacaagcgcgtagggcacgtctacaagaaagcatttatgcaagttgtcgaggctgacatgctctctaagggtctactcggtggcgaggcgtggtcttcgtggcataaggaagactctattcatgtaggagtacgctgcatcgagatgctcattgagtcaaccggaatggttagcttacaccgccaaaatgctggcgtagtaggtcaagactctgagactatcgaactcgcacctgaatacgctgaggctatcgcaacccgtgcaggtgcgctggctggcatctctccgatgttccaaccttgcgtagttcctcctaagccgtggactggcattactggtggtggctattgggctaacggtcgtcgtcctctggcgctggtgcgtactcacagtaagaaaggtctgatgcgctacgaagacgtttacatgcctgaggtgtacaaagcgattaacattgcgcaaaacaccgcctggtcgatcaacaagtgggtcctggcggtcgccaacgtaatcaccaagtggaagcattgtccggtccgggacatccctgcgattgagcgtgaagaactcccgatgaaaccggaagacatcgacatgaatcctgaggctctcaccgcgtggaaacgtgctaaagctgctgtgtaccgcagagacaaggctcgcaagtctcgccgtatcttgcttgagttcatgcttgagcaagccaataagtttgctaaccataaggccatctggttcccttacaacatggactggcgcggtcgtgtttacgctgtgccgatgttcaacccgcaaggtaacgatatgaccaaaggactgcttacgctggcgaaaggtaaaccaatcggtaaggaaggttactactggctgaaaatccacggtgcaaactgtgcgggtgtcgataaggttccgttccctgagcgcatcaagttcattgaggaaaaccacgagaacatcatggcttgcgctaagtctccactggagaacacttggtgggctgagcaagatagtccgttctgcttccttgcgttctgctttgagtacgctggggtacagcaccacggcctgagctataactgctcccttccgctggcgtttgacgggtcttgctctggcatccagcacttctccgcgatgctccgagatgaggtaggtggtcgcgcggttaacttgcttcctagtgaaaccgttcaggacatctacgggattgttgctaagaaagtcaacgagattctacaagcagacgcaatcaatgggaccgataacgaagtagttaccgtgaccgatgagaacactggtgaaatctctgagaaagtcaagctgggcactaaggcactggctggtcaatggctggcttacggtgttactcgcagtgtgactaagcgttcagtcatgacgctggcttacgggtccaaagagttcggcttccgtcaacaagtgctgcgccacactattcagtgggctattgattccggcaagggtctgatgttcactcagccgaatcaggctgctggatacatggctaagctgatttgggaatctgtgagcgtgacggtggtagctgcggttgaagcaatgaactggcttaagtctgctgctaagctgctggctgctgaggtctttgataagaagactggagagattcttcgcaagcgttgcgctgtgcattgggtaactcctgatggtttccctgtgtggcaggaatacaagaagcctattcagacgcgcttgaacctgatgttcctcggtcagttccgcttacagcctaccattaacaccaacaaagatagcgagattgatgcacgtaaacaggagtctggtatcgctcctaactttgtacacagccaagacggtagccaccttcgtaagactgtagtgtgggcacacgagaagtacggaatcgaatcttttgcactgattcacgactccttcggtaccattccggctgacgctgcgaacctgttcaaagcagtgcgcgaaactatggttgacacatatgagtcttgtgatgtactggctgatttctacgaccagttcgctgaccagttgcacgagtctcaattggacaaaatgccagcacttccggctaaaggtaacttgaacctccgtgacatcttagagtcggacttcgcgttcgcg

SEQ ID NO: 302 - protein, 890 aa, synthetic construct
  REGION 1..890: note = Variant of RNA polymerase
MHHHHHHMNTINIAKNDFSDIELAAIPFNTLADHYGEGLAREQLALEHESYEMGEARFRKMFERQLKAGEVADNAAAKPLITTLLPKMIARINDWFEEVKAKRGKRPTAFQFLQEIKPEAVAYITIKTTLACLTSADRTTVQAVASAIGRAIEDEARFGRIRDLEAKHFKKNYEEQLNKRVGHVYKKAFMQVVEADMLSKGLLGGEAWSSWHKEDSIHVGVRCIEMLIESTGMVSLHRQNAGVVGQDSETIELAPEYAEAIATRAGALAGISPMFQPCVVPPKPWTGITGGGYWANGRRPLALVRTHSKKGLMRYEDVYMPEVYKAINIAQNTAWSINKWVLAVANVITKWKHCPVRDIPAIEREELPMKPEDIDMNPEALTAWKRAKAAVYRRDKARKSRRILLEFMLEQANKFANHKAIWFPYNMDWRGRVYAVPMFNPQGNDMTKGLLTLAKGKPIGKEGYYWLKIHGANCAGVDKVPFPERIKFIEENHENIMACAKSPLENTWWAEQDSPFCFLAFCFEYAGVQHHGLSYNCSLPLAFDGSCSGIQHFSAMLRDEVGGRAVNLLPSETVQDIYGIVAKKVNEILQADAINGTDNEVVTVTDENTGEISEKVKLGTKALAGQWLAYGVTRSVTKRSVMTLAYGSKEFGFRQQVLRHTIQWAIDSGKGLMFTQPNQAAGYMAKLIWESVSVTVVAAVEAMNWLKSAAKLLAAEVFDKKTGEILRKRCAVHWVTPDGFPVWQEYKKPIQTRLNLMFLGQFRLQPTINTNKDSEIDARKQESGIAPNFVHSQDGSHLRKTVVWAHEKYGIESFALIHDSFGTIPADAANLFKAVRETMVDTYESCDVLADFYDQFADQLHESQLDKMPALPAKGNLNLRDILESDFAFA

SEQ ID NO: 303 - DNA, 2670 bp, synthetic construct
  misc_feature 1..2670: note = Variant of RNA polymerase
  source 1..2670: mol_type = other DNA
atgcaccatcaccatcaccatatgaacacgattaacatcgctaagaacgacttctctgacatcgaactggctgctatcccgttcaacactctggctgaccattacggtgagggcttagctcgcgaacagttggcccttgagcatgagtcttacgagatgggtgaagcacgtttccgcaagatgtttgagcgtcaacttaaagctggtgaggttgcggataacgctgccgccaagcctctcatcactaccctactccctaagatgattgcacgcatcaacgactggtttgaggaagtgaaagctaagcgcggcaagcgcccgacagccttccagttcctgcaagaaatcaagccggaagccgtagcgtacatcaccattaagaccactctggcttgcctaaccagtgcggaccgtacaaccgttcaggctgtagcaagcgcaatcggtcgggccattgaggacgaggctcgcttcggtcgtatccgtgaccttgaagctaagcacttcaagaaaaactatgaggaacaactcaacaagcgcgtagggcacgtctacaagaaagcatttatgcaagttgtcgaggctgacatgctctctaagggtctactcggtggcgaggcgtggtcttcgtggcataaggaagactctattcatgtaggagtacgctgcatcgagatgctcattgagtcaaccggaatggttagcttacaccgccaaaatgctggcgtagtaggtcaagactctgagactatcgaactcgcacctgaatacgctgaggctatcgcaacccgtgcaggtgcgctggctggcatctctccgatgttccaaccttgcgtagttcctcctaagccgtggactggcattactggtggtggctattgggctaacggtcgtcgtcctctggcgctggtgcgtactcacagtaagaaaggtctgatgcgctacgaagacgtttacatgcctgaggtgtacaaagcgattaacattgcgcaaaacaccgcctggtcgatcaacaagtgggtcctggcggtcgccaacgtaatcaccaagtggaagcattgtccggtccgggacatccctgcgattgagcgtgaagaactcccgatgaaaccggaagacatcgacatgaatcctgaggctctcaccgcgtggaaacgtgctaaagctgctgtgtaccgcagagacaaggctcgcaagtctcgccgtatcttgcttgagttcatgcttgagcaagccaataagtttgctaaccataaggccatctggttcccttacaacatggactggcgcggtcgtgtttacgctgtgccgatgttcaacccgcaaggtaacgatatgaccaaaggactgcttacgctggcgaaaggtaaaccaatcggtaaggaaggttactactggctgaaaatccacggtgcaaactgtgcgggtgtcgataaggttccgttccctgagcgcatcaagttcattgaggaaaaccacgagaacatcatggcttgcgctaagtctccactggagaacacttggtgggctgagcaagatagtccgttctgcttccttgcgttctgctttgagtacgctggggtacagcaccacggcctgagctataactgctcccttccgctggcgtttgacgggtcttgctctggcatccagcacttctccgcgatgctccgagatgaggtaggtggtcgcgcggttaacttgcttcctagtgaaaccgttcaggacatctacgggattgttgctaagaaagtcaacgagattctacaagcagacgcaatcaatgggaccgataacgaagtagttaccgtgaccgatgagaactttggtgaaatctctgagaaagtcaagctgggcactaaggcactggctggtcaatggctggcttacggtgttactcgcagtgtgactaagcgttcagtcatgacgctggcttacgggtccaaagagttcggcttccgtcaacaagtgctgcgccacactattcagtgggctattgattccggcaagggtctgatgttcactcagccgaatcaggctgctggatacatggctaagctgatttgggaatctgtgagcgtgacggtggtagctgcggttgaagcaatgaactggcttaagtctgctgctaagctgctggctgctgaggtcaaagataagaagactggagagattcttcgcaagcgttgcgctgtgcattgggtaactcctgatggtttccctgtgtggcaggaatacaagaagcctattcagacgcgcttgaacctgatgttcctcggtcagttccgcttacagcctaccattaacaccaacaaagatagcgagattgatgcacgtaaacaggagtctggtatcgctcctaactttgtacacagccaagacggtagccaccttcgtaagactgtagtgtgggcacacgagaagtacggaatcgaatcttttgcactgattcacgactccttcggtaccattccggctgacgctgcgaacctgttcaaagcagtgcgcgaaactatggttgacacatatgagtcttgtgatgtactggctgatttctacgaccagttcgctgaccagttgcacgagtctcaattggacaaaatgccagcacttccggctaaaggtaacttgaacctccgtgacatcttagagtcggacttcgcgttcgcg

SEQ ID NO: 304 - protein, 890 aa, synthetic construct
  REGION 1..890: note = Variant of RNA polymerase
MHHHHHHMNTINIAKNDFSDIELAAIPFNTLADHYGEGLAREQLALEHESYEMGEARFRKMFERQLKAGEVADNAAAKPLITTLLPKMIARINDWFEEVKAKRGKRPTAFQFLQEIKPEAVAYITIKTTLACLTSADRTTVQAVASAIGRAIEDEARFGRIRDLEAKHFKKNYEEQLNKRVGHVYKKAFMQVVEADMLSKGLLGGEAWSSWHKEDSIHVGVRCIEMLIESTGMVSLHRQNAGVVGQDSETIELAPEYAEAIATRAGALAGISPMFQPCVVPPKPWTGITGGGYWANGRRPLALVRTHSKKGLMRYEDVYMPEVYKAINIAQNTAWSINKWVLAVANVITKWKHCPVRDIPAIEREELPMKPEDIDMNPEALTAWKRAKAAVYRRDKARKSRRILLEFMLEQANKFANHKAIWFPYNMDWRGRVYAVPMFNPQGNDMTKGLLTLAKGKPIGKEGYYWLKIHGANCAGVDKVPFPERIKFIEENHENIMACAKSPLENTWWAEQDSPFCFLAFCFEYAGVQHHGLSYNCSLPLAFDGSCSGIQHFSAMLRDEVGGRAVNLLPSETVQDIYGIVAKKVNEILQADAINGTDNEVVTVTDENFGEISEKVKLGTKALAGQWLAYGVTRSVTKRSVMTLAYGSKEFGFRQQVLRHTIQWAIDSGKGLMFTQPNQAAGYMAKLIWESVSVTVVAAVEAMNWLKSAAKLLAAEVKDKKTGEILRKRCAVHWVTPDGFPVWQEYKKPIQTRLNLMFLGQFRLQPTINTNKDSEIDARKQESGIAPNFVHSQDGSHLRKTVVWAHEKYGIESFALIHDSFGTIPADAANLFKAVRETMVDTYESCDVLADFYDQFADQLHESQLDKMPALPAKGNLNLRDILESDFAFA

SEQ ID NO: 305 - DNA, 2670 bp, synthetic construct
  misc_feature 1..2670: note = Variant of RNA polymerase
  source 1..2670: mol_type = other DNA
atgcaccatcaccatcaccatatgaacacgattaacatcgctaagaacgacttctctgacatcgaactggctgctatcccgttcaacactctggctgaccattacggtgagggcttagctcgcgaacagttggcccttgagcatgagtcttacgagatgggtgaagcacgtttccgcaagatgtttgagcgtcaacttaaagctggtgaggttgcggataacgctgccgccaagcctctcatcactaccctactccctaagatgattgcacgcatcaacgactggtttgaggaagtgaaagctaagcgcggcaagcgcccgacagccttccagttcctgcaagaaatcaagccggaagccgtagcgtacatcaccattaagaccactctggcttgcctaaccagtgcggaccgtacaaccgttcaggctgtagcaagcgcaatcggtcgggccattgaggacgaggctcgcttcggtcgtatccgtgaccttgaagctaagcacttcaagaaaaactatgaggaacaactcaacaagcgcgtagggcacgtctacaagaaagcatttatgcaagttgtcgaggctgacatgctctctaagggtctactcggtggcgaggcgtggtcttcgtggcataaggaagactctattcatgtaggagtacgctgcatcgagatgctcattgagtcaaccggaatggttagcttacaccgccaaaatgctggcgtagtaggtcaagactctgagactatcgaactcgcacctgaatacgctgaggctatcgcaacccgtgcaggtgcgctggctggcatctctccgatgttccaaccttgcgtagttcctcctaagccgtggactggcattactggtggtggctattgggctaacggtcgtcgtcctctggcgctggtgcgtactcacagtaagaaaggtctgatgcgctacgaagacgtttacatgcctgaggtgtacaaagcgattaacattgcgcaaaacaccgcctggtcgatcaacaagtgggtcctggcggtcgccaacgtaatcaccaagtggaagcattgtccggtccgggacatccctgcgattgagcgtgaagaactcccgatgaaaccggaagacatcgacatgaatcctgaggctctcaccgcgtggaaacgtgctaaagctgctgtgtaccgcagagacaaggctcgcaagtctcgccgtatcttgcttgagttcatgcttgagcaagccaataagtttgctaaccataaggccatctggttcccttacaacatggactggcgcggtcgtgtttacgctgtgccgatgttcaacccgcaaggtaacgatatgaccaaaggactgcttacgctggcgaaaggtaaaccaatcggtaaggaaggttactactggctgaaaatccacggtgcaaactgtgcgggtgtcgataaggttccgttccctgagcgcatcaagttcattgaggaaaaccacgagaacatcatggcttgcgctaagtctccactggagaacacttggtgggctgagcaagatagtccgttctgcttccttgcgttctgctttgagtacgctggggtacagcaccacggcctgagctataactgctcccttccgctggcgtttgacgggtcttgctctggcatccagcacttctccgcgatgctccgagatgaggtaggtggtcgcgcggttaacttgcttcctagtgaaaccgttcaggacatctacgggattgttgctaagaaagtcaacgagattctacaagcagacgcaatcaatgggaccgataacgaagtagttaccgtgaccgatgagaacactggtgaaatctctgagaaagtcaagctgggcactaaggcactggctggtcaatggctggcttacggtgttactcgcagtgtgactaagcgttcagtcatgacgctggcttacgggtccaaagagttcggcttccgtcaacaagtgctgcgccacactattcagtgggctattgattccggcaagggtctgatgttcactcagccgaatcaggctgctggatacatggctaagctgatttgggaatctgtgagcgtgacggtggtagctgcggttgaagcaatgaactggcttaagtctgctgctaagctgctggctgctgaggtcaaagatagtaagactggagagattcttcgcaagcgttgcgctgtgcattgggtaactcctgatggtttccctgtgtggcaggaatacaagaagcctattcagacgcgcttgaacctgatgttcctcggtcagttccgcttacagcctaccattaacaccaacaaagatagcgagattgatgcacgtaaacaggagtctggtatcgctcctaactttgtacacagccaagacggtagccaccttcgtaagactgtagtgtgggcacacgagaagtacggaatcgaatcttttgcactgattcacgactccttcggtaccattccggctgacgctgcgaacctgttcaaagcagtgcgcgaaactatggttgacacatatgagtcttgtgatgtactggctgatttctacgaccagttcgctgaccagttgcacgagtctcaattggacaaaatgccagcacttccggctaaaggtaacttgaacctccgtgacatcttagagtcggacttcgcgttcgcg

SEQ ID NO: 306 - protein, 890 aa, synthetic construct
  REGION 1..890: note = Variant of RNA polymerase
MHHHHHHMNTINIAKNDFSDIELAAIPFNTLADHYGEGLAREQLALEHESYEMGEARFRKMFERQLKAGEVADNAAAKPLITTLLPKMIARINDWFEEVKAKRGKRPTAFQFLQEIKPEAVAYITIKTTLACLTSADRTTVQAVASAIGRAIEDEARFGRIRDLEAKHFKKNYEEQLNKRVGHVYKKAFMQVVEADMLSKGLLGGEAWSSWHKEDSIHVGVRCIEMLIESTGMVSLHRQNAGVVGQDSETIELAPEYAEAIATRAGALAGISPMFQPCVVPPKPWTGITGGGYWANGRRPLALVRTHSKKGLMRYEDVYMPEVYKAINIAQNTAWSINKWVLAVANVITKWKHCPVRDIPAIEREELPMKPEDIDMNPEALTAWKRAKAAVYRRDKARKSRRILLEFMLEQANKFANHKAIWFPYNMDWRGRVYAVPMFNPQGNDMTKGLLTLAKGKPIGKEGYYWLKIHGANCAGVDKVPFPERIKFIEENHENIMACAKSPLENTWWAEQDSPFCFLAFCFEYAGVQHHGLSYNCSLPLAFDGSCSGIQHFSAMLRDEVGGRAVNLLPSETVQDIYGIVAKKVNEILQADAINGTDNEVVTVTDENTGEISEKVKLGTKALAGQWLAYGVTRSVTKRSVMTLAYGSKEFGFRQQVLRHTIQWAIDSGKGLMFTQPNQAAGYMAKLIWESVSVTVVAAVEAMNWLKSAAKLLAAEVKDSKTGEILRKRCAVHWVTPDGFPVWQEYKKPIQTRLNLMFLGQFRLQPTINTNKDSEIDARKQESGIAPNFVHSQDGSHLRKTVVWAHEKYGIESFALIHDSFGTIPADAANLFKAVRETMVDTYESCDVLADFYDQFADQLHESQLDKMPALPAKGNLNLRDILESDFAFA

SEQ ID NO: 307 - DNA, 2670 bp, synthetic construct
  misc_feature 1..2670: note = Variant of RNA polymerase
  source 1..2670: mol_type = other DNA
atgcaccatcaccatcaccatatgaacacgattaacatcgctaagaacgacttctctgacatcgaactggctgctatcccgttcaacactctggctgaccattacggtgagggcttagctcgcgaacagttggcccttgagcatgagtcttacgagatgggtgaagcacgtttccgcaagatgtttgagcgtcaacttaaagctggtgaggttgcggataacgctgccgccaagcctctcatcactaccctactccctaagatgattgcacgcatcaacgactggtttgaggaagtgaaagctaagcgcggcaagcgcccgacagccttccagttcctgcaagaaatcaagccggaagccgtagcgtacatcaccattaagaccactctggcttgcctaaccagtgcggaccgtacaaccgttcaggctgtagcaagcgcaatcggtcgggccattgaggacgaggctcgcttcggtcgtatccgtgaccttgaagctaagcacttcaagaaaaactatgaggaacaactcaacaagcgcgtagggcacgtctacaagctggcatttatgcaagttgtcgaggctgacatgctctctaagggtctactcggtggcgaggcgtggtcttcgtggcataaggaagactctattcatgtaggagtacgctgcatcgagatgctcattgagtcaaccggaatggttagcttacaccgccaaaatgctggcgtagtaggtcaagactctgagactatcgaactcgcacctgaatacgctgaggctatcgcaacccgtgcaggtgcgctggctggcatctctccgatgttccaaccttgcgtagttcctcctaagccgtggactggcattactggtggtggctattgggctaacggtcgtcgtcctctggcgctggtgcgtactcacagtaagaaaggtctgatgcgctacgaagacgtttacatgcctgaggtgtacaaagcgattaacattgcgcaaaacaccgcctggtcgatcaacaagtgggtcctggcggtcgccaacgtaatcaccaagtggaagcattgtccggtccgggacatccctgcgattgagcgtgaagaactcccgatgaaaccggaagacatcgacatgaatcctgaggctctcaccgcgtggaaacgtgctaaagctgctgtgtaccgcagagacaaggctcgcaagtctcgccgtatcttgcttgagttcatgcttgagcaagccaataagtttgctaaccataaggccatctggttcccttacaacatggactggcgcggtcgtgtttacgctgtgccgatgttcaacccgcaaggtaacgatatgaccaaaggactgcttacgctggcgaaaggtaaaccaatcggtaaggaaggttactactggctgaaaatccacggtgcaaactgtgcgggtgtcgataaggttccgttccctgagcgcatcaagttcattgaggaaaaccacgagaacatcatggcttgcgctaagtctccactggagaacacttggtgggctgagcaagatagtccgttctgcttccttgcgttctgctttgagtacgctggggtacagcaccacggcctgagctataactgctcccttccgctggcgtttgacgggtcttgctctggcatccagcacttctccgcgatgctccgagatgaggtaggtggtcgcgcggttaacttgcttcctagtgaaaccgttcaggacatctacgggattgttgctaagaaagtcaacgagattctacaagcagacgcaatcaatgggaccgataacgaagtagttaccgtgaccgatgagaacactggtgaaatctctgagaaagtcaagctgggcactaaggcactggctggtcaatggctggcttacggtgttactcgcagtgtgactaagcgttcagtcatgacgctggcttacgggtccaaagagttcggcttccgtcaacaagtgctgcgccacactattcagtgggctattgattccggcaagggtctgatgttcactcagccgaatcaggctgctggatacatggctaagctgatttgggaatctgtgagcgtgacggtggtagctgcggttgaagcaatgaactggcttaagtctgctgctaagctgctggctgctgaggtcaaagataagaagactggagagattcttcgcaagcgttgcgctgtgcattgggtaactcctgatggtttccctgtgtggcaggaatacaagaagcctattcagacgcgcttgaacctgatgttcctcggtcagttccgcttacagcctaccattaacaccaacaaagatagcgagattgatgcacgtaaacaggagtctggtatcgctcctaactttgtacacagccaagacggtagccaccttcgtaagactgtagtgtgggcacacgagaagtacggaatcgaatcttttgcactgattcacgactccttcggtaccattccggctgacgctgcgaacctgttcaaagcagtgcgcgaaactatggttgacacatatgagtcttgtgatgtactggctgatttctacgaccagttcgctgaccagttgcacgagtctcaattggacaaaatgccagcacttccggctaaaggtaacttgaacctccgtgacatcttagagtcggacttcgcgttcgcg

SEQ ID NO: 308 - protein, 890 aa, synthetic construct
  REGION 1..890: note = Variant of RNA polymerase
MHHHHHHMNTINIAKNDFSDIELAAIPFNTLADHYGEGLAREQLALEHESYEMGEARFRKMFERQLKAGEVADNAAAKPLITTLLPKMIARINDWFEEVKAKRGKRPTAFQFLQEIKPEAVAYITIKTTLACLTSADRTTVQAVASAIGRAIEDEARFGRIRDLEAKHFKKNYEEQLNKRVGHVYKLAFMQVVEADMLSKGLLGGEAWSSWHKEDSIHVGVRCIEMLIESTGMVSLHRQNAGVVGQDSETIELAPEYAEAIATRAGALAGISPMFQPCVVPPKPWTGITGGGYWANGRRPLALVRTHSKKGLMRYEDVYMPEVYKAINIAQNTAWSINKWVLAVANVITKWKHCPVRDIPAIEREELPMKPEDIDMNPEALTAWKRAKAAVYRRDKARKSRRILLEFMLEQANKFANHKAIWFPYNMDWRGRVYAVPMFNPQGNDMTKGLLTLAKGKPIGKEGYYWLKIHGANCAGVDKVPFPERIKFIEENHENIMACAKSPLENTWWAEQDSPFCFLAFCFEYAGVQHHGLSYNCSLPLAFDGSCSGIQHFSAMLRDEVGGRAVNLLPSETVQDIYGIVAKKVNEILQADAINGTDNEVVTVTDENTGEISEKVKLGTKALAGQWLAYGVTRSVTKRSVMTLAYGSKEFGFRQQVLRHTIQWAIDSGKGLMFTQPNQAAGYMAKLIWESVSVTVVAAVEAMNWLKSAAKLLAAEVKDKKTGEILRKRCAVHWVTPDGFPVWQEYKKPIQTRLNLMFLGQFRLQPTINTNKDSEIDARKQESGIAPNFVHSQDGSHLRKTVVWAHEKYGIESFALIHDSFGTIPADAANLFKAVRETMVDTYESCDVLADFYDQFADQLHESQLDKMPALPAKGNLNLRDILESDFAFA

SEQ ID NO: 309 - DNA, 2670 bp, synthetic construct
  misc_feature 1..2670: note = Variant of RNA polymerase
  source 1..2670: mol_type = other DNA
atgcaccatcaccatcaccatatgaacacgattaacatcgctaagaacgacttctctgacatcgaactggctgctatcccgttcaacactctggctgaccattacggtgagggcttagctcgcgaacagttggcccttgagcatgagtcttacgagatgggtgaagcacgtttccgcaagatgtttgagcgtcaacttaaagctggtgaggttgcggataacgctgccgccaagcctctcatcactaccctactccctaagatgattgcacgcatcaacgactggtttgaggaagtgaaagctaagcgcggcaagcgcccgacagccttccagttcctgcaagaaatcaagccggaagccgtagcgtacatcaccattaagaccactctggcttgcctaaccagtgcggaccgtacaaccgttcaggctgtagcaagcgcaatcggtcgggccattgaggacgaggctcgcttcggtcgtatccgtgaccttgaagctaagcacttcaagaaaaactatgaggaacaactcaacaagcgcgtagggcacgtctacaagaaagcatttatgcaagttgtcgaggctgacatgctctctaagggtctactcggtggcgaggcgtggtcttcgtggcataaggaagactctattcatgtaggagtacgctgcatcgagatgctcattgagtcaaccggaatggttagcttacaccgccaaaatgctggcgtagtaggtcaagactctgagactatcgaactcgcacctgaatacgctgaggctatcgcaacccgtgcaggtgcgctggctggcatctctccgatgttccaaccttgcgtagttcctcctaagccgtggactggcattactggtggtggctattgggctaacggtcgtcgtcctctggcgctggtgcgtactcacagtaagaaaggtctgatgcgctacgaagacgtttacatgcctgaggtgtacaaagcgattaacattgcgcaaaacaccgcctggtcgatcaacaagtgggtcctggcggtcgccaacgtaatcaccaagtggaagcattgtccggtccgggacatccctgcgattgagcgtgaagaactcccgatgaaaccggaagacatcgacatgaatcctgaggctctcaccgcgtggaaacgtgctaaagctgctgtgtaccgcagagacaaggctcgcaagtctcgccgtatcttgcttgagttcatgcttgagcaagccaataagtttgctaaccataaggccatctggttcccttacaacatggactggcgcggtcgtgtttacgctgtgccgatgttcaacccgcaaggtaacgatatgaccaaaggactgcttacgctggcgaaaggtaaaccaatcggtaaggaaggttactactggctgaaaatccacggtgcaaactgtgcgggtgtcgataaggttccgttccctgagcgcatcaagttcattgaggaaaaccacgagaacatcatggcttgcgctaagtctccactggagaacacttggtgggctgagcaagatagtccgttctgcttccttgcgttctgctttgagtacgctggggtacagcaccacggcctgagctataactgctcccttccgctggcgtttgacgggtcttgctctggcatccagcacttctccgcgatgctccgagatgaggtaggtggtcgcgcggttaacttgcttcctagtgaaaccgttcaggacatctacgggattgttgctaagaaagtcaacgagattctacaagcagacgcaatcaatgggaccgataacgaagtagttaccgtgaccgatgagaacactggtgaaatctctgagaaagtcaagctgggcactaaggcactggctggtcaatggctggcttacggtgttactcgcagtgtgactaagcgttcagtcatgacgctggcttacgggtccaaagagttcggcttccgtcaacaagtgctgcgccacactattcagtgggctattgattccggcaagggtctgatgttcactcagccgaatcaggctgctggatacatggctaagctgatttgggaatctgtgagcgtgacggtggtagctgcggttgaagcaatgaactggcttaagtctgctgctaagctgctggctgctgaggtcgttgataagaagactggagagattcttcgcaagcgttgcgctgtgcattgggtaactcctgatggtttccctgtgtggcaggaatacaagaagcctattcagacgcgcttgaacctgatgttcctcggtcagttccgcttacagcctaccattaacaccaacaaagatagcgagattgatgcacgtaaacaggagtctggtatcgctcctaactttgtacacagccaagacggtagccaccttcgtaagactgtagtgtgggcacacgagaagtacggaatcgaatcttttgcactgattcacgactccttcggtaccattccggctgacgctgcgaacctgttcaaagcagtgcgcgaaactatggttgacacatatgagtcttgtgatgtactggctgatttctacgaccagttcgctgaccagttgcacgagtctcaattggacaaaatgccagcacttccggctaaaggtaacttgaacctccgtgacatcttagagtcggacttcgcgttcgcg

SEQ ID NO: 310 - protein, 890 aa, synthetic construct
  REGION 1..890: note = Variant of RNA polymerase
MHHHHHHMNTINIAKNDFSDIELAAIPFNTLADHYGEGLAREQLALEHESYEMGEARFRKMFERQLKAGEVADNAAAKPLITTLLPKMIARINDWFEEVKAKRGKRPTAFQFLQEIKPEAVAYITIKTTLACLTSADRTTVQAVASAIGRAIEDEARFGRIRDLEAKHFKKNYEEQLNKRVGHVYKKAFMQVVEADMLSKGLLGGEAWSSWHKEDSIHVGVRCIEMLIESTGMVSLHRQNAGVVGQDSETIELAPEYAEAIATRAGALAGISPMFQPCVVPPKPWTGITGGGYWANGRRPLALVRTHSKKGLMRYEDVYMPEVYKAINIAQNTAWSINKWVLAVANVITKWKHCPVRDIPAIEREELPMKPEDIDMNPEALTAWKRAKAAVYRRDKARKSRRILLEFMLEQANKFANHKAIWFPYNMDWRGRVYAVPMFNPQGNDMTKGLLTLAKGKPIGKEGYYWLKIHGANCAGVDKVPFPERIKFIEENHENIMACAKSPLENTWWAEQDSPFCFLAFCFEYAGVQHHGLSYNCSLPLAFDGSCSGIQHFSAMLRDEVGGRAVNLLPSETVQDIYGIVAKKVNEILQADAINGTDNEVVTVTDENTGEISEKVKLGTKALAGQWLAYGVTRSVTKRSVMTLAYGSKEFGFRQQVLRHTIQWAIDSGKGLMFTQPNQAAGYMAKLIWESVSVTVVAAVEAMNWLKSAAKLLAAEVVDKKTGEILRKRCAVHWVTPDGFPVWQEYKKPIQTRLNLMFLGQFRLQPTINTNKDSEIDARKQESGIAPNFVHSQDGSHLRKTVVWAHEKYGIESFALIHDSFGTIPADAANLFKAVRETMVDTYESCDVLADFYDQFADQLHESQLDKMPALPAKGNLNLRDILESDFAFA

SEQ ID NO: 311 - DNA, 2670 bp, synthetic construct
  misc_feature 1..2670: note = Variant of RNA polymerase
  source 1..2670: mol_type = other DNA
atgcaccatcaccatcaccatatgaacacgattaacatcgctaagaacgacttctctgacatcgaactggctgctatcccgttcaacactctggctgaccattacggtgagggcttagctcgcgaacagttggcccttgagcatgagtcttacgagatgggtgaagcacgtttccgcaagatgtttgagcgtcaacttaaagctggtgaggttgcggataacgctgccgccaagcctctcatcactaccctactccctaagatgattgcacgcatcaacgactggtttgaggaagtgaaagctaagcgcggcaagcgcccgacagccttccagttcctgcaagaaatcaagccggaagccgtagcgtacatcaccattaagaccactctggcttgcctaaccagtgcggaccgtacaaccgttcaggctgtagcaagcgcaatcggtcgggccattgaggacgaggctcgcttcggtcgtatccgtgaccttgaagctaagcacttcctgaaaaacgttgaggaacaactcaacaagcgcgtagggcacgtctacaagaaagcatttatgcaagttgtcgaggctgacatgctctctaagggtctactcggtggcgaggcgtggtcttcgtggcataaggaagactctattcatgtaggagtacgctgcatcgagatgctcattgagtcaaccggaatggttagcttacaccgccaaaatgctggcgtagtaggtcaagactctgagactatcgaactcgcacctgaatacgctgaggctatcgcaacccgtgcaggtgcgctggctggcatctctccgatgttccaaccttgcgtagttcctcctaagccgtggactggcattactggtggtggctattgggctaacggtcgtcgtcctctggcgctggtgcgtactcacagtaagaaaggtctgatgcgctacgaagacgtttacatgcctgaggtgtacaaagcgattaacattgcgcaaaacaccgcctggtcgatcaacaagtgggtcctggcggtcgccaacgtaatcaccaagtggaagcattgtccggtccgggacatccctgcgattgagcgtgaagaactcccgatgaaaccggaagacatcgacatgaatcctgaggctctcaccgcgtggaaacgtgctaaagctgctgtgtaccgcagagacaaggctcgcaagtctcgccgtatcttgcttgagttcatgcttgagcaagccaataagtttgctaaccataaggccatctggttcccttacaacatggactggcgcggtcgtgtttacgctgtgccgatgttcaacccgcaaggtaacgatatgaccaaaggactgcttacgctggcgaaaggtaaaccaatcggtaaggaaggttactactggctgaaaatccacggtgcaaactgtgcgggtgtcgataaggttccgttccctgagcgcatcaagttcattgaggaaaaccacgagaacatcatggcttgcgctaagtctccactggagaacacttggtgggctgagcaagatagtccgttctgcttccttgcgttctgctttgagtacgctggggtacagcaccacggcctgagctataactgctcccttccgctggcgtttgacgggtcttgctctggcatccagcacttctccgcgatgctccgagatgaggtaggtggtcgcgcggttaacttgcttcctagtgaaaccgttcaggacatctacgggattgttgctaagaaagtcaacgagattctacaagcagacgcaatcaatgggaccgataacgaagtagttaccgtgaccgatgagaacactggtgaaatctctgagaaagtcaagctgggcactaaggcactggctggtcaatggctggcttacggtgttactcgcagtgtgactaagcgttcagtcatgacgctggcttacgggtccaaagagttcggcttccgtcaacaagtgctgcgccacactattcagtgggctattgattccggcaagggtctgatgttcactcagccgaatcaggctgctggatacatggctaagctgatttgggaatctgtgagcgtgacggtggtagctgcggttgaagcaatgaactggcttaagtctgctgctaagctgctggctgctgaggtcaaagataagaagactggagagattcttcgcaagcgttgcgctgtgcattgggtaactcctgatggtttccctgtgtggcaggaatacaagaagcctattcagacgcgcttgaacctgatgttcctcggtcagttccgcttacagcctaccattaacaccaacaaagatagcgagattgatgcacgtaaacaggagtctggtatcgctcctaactttgtacacagccaagacggtagccaccttcgtaagactgtagtgtgggcacacgagaagtacggaatcgaatcttttgcactgattcacgactccttcggtaccattccggctgacgctgcgaacctgttcaaagcagtgcgcgaaactatggttgacacatatgagtcttgtgatgtactggctgatttctacgaccagttcgctgaccagttgcacgagtctcaattggacaaaatgccagcacttccggctaaaggtaacttgaacctccgtgacatcttagagtcggacttcgcgttcgcg

SEQ ID NO: 312 - protein, 890 aa, synthetic construct
  REGION 1..890: note = Variant of RNA polymerase
MHHHHHHMNTINIAKNDFSDIELAAIPFNTLADHYGEGLAREQLALEHESYEMGEARFRKMFERQLKAGEVADNAAAKPLITTLLPKMIARINDWFEEVKAKRGKRPTAFQFLQEIKPEAVAYITIKTTLACLTSADRTTVQAVASAIGRAIEDEARFGRIRDLEAKHFLKNVEEQLNKRVGHVYKKAFMQVVEADMLSKGLLGGEAWSSWHKEDSIHVGVRCIEMLIESTGMVSLHRQNAGVVGQDSETIELAPEYAEAIATRAGALAGISPMFQPCVVPPKPWTGITGGGYWANGRRPLALVRTHSKKGLMRYEDVYMPEVYKAINIAQNTAWSINKWVLAVANVITKWKHCPVRDIPAIEREELPMKPEDIDMNPEALTAWKRAKAAVYRRDKARKSRRILLEFMLEQANKFANHKAIWFPYNMDWRGRVYAVPMFNPQGNDMTKGLLTLAKGKPIGKEGYYWLKIHGANCAGVDKVPFPERIKFIEENHENIMACAKSPLENTWWAEQDSPFCFLAFCFEYAGVQHHGLSYNCSLPLAFDGSCSGIQHFSAMLRDEVGGRAVNLLPSETVQDIYGIVAKKVNEILQADAINGTDNEVVTVTDENTGEISEKVKLGTKALAGQWLAYGVTRSVTKRSVMTLAYGSKEFGFRQQVLRHTIQWAIDSGKGLMFTQPNQAAGYMAKLIWESVSVTVVAAVEAMNWLKSAAKLLAAEVKDKKTGEILRKRCAVHWVTPDGFPVWQEYKKPIQTRLNLMFLGQFRLQPTINTNKDSEIDARKQESGIAPNFVHSQDGSHLRKTVVWAHEKYGIESFALIHDSFGTIPADAANLFKAVRETMVDTYESCDVLADFYDQFADQLHESQLDKMPALPAKGNLNLRDILESDFAFA

SEQ ID NO: 313 - DNA, 2670 bp, synthetic construct
  misc_feature 1..2670: note = Variant of RNA polymerase
  source 1..2670: mol_type = other DNA
atgcaccatcaccatcaccatatgaacacgattaacatcgctaagaacgacttctctgacatcgaactggctgctatcccgttcaacactctggctgaccattacggtgagggcttagctcgcgaacagttggcccttgagcatgagtcttacgagatgggtgaagcacgtttccgcaagatgtttgagcgtcaacttaaagctggtgaggttgcggataacgctgccgccaagcctctcatcactaccctactccctaagatgattgcacgcatcaacgactggtttgaggaagtgaaagctaagcgcggcaagcgcccgacagccttccagttcctgcaagaaatcaagccggaagccgtagcgtacatcaccattaagaccactctggcttgcctaaccagtgcggaccgtacaaccgttcaggctgtagcaagcgcaatcggtcgggccattgaggacgaggctcgcttcggtcgtatccgtgaccttgaagctaagcacttcaagaaaaactatgaggaacaactcaacaagcgcgtagggcacgtctacaagaaagcatttatgcaagttgtcgaggctgacatgctctctaagggtctactcggtggcgaggcgtggtcttcgtggcataaggaagactctattcatgtaggagtacgctgcatcgagatgctcattgagtcaaccggaatggttagcttacaccgccaaaatgctggcgtagtaggtcaagactctgagactatcgaactcgcacctgaatacgctgaggctatcgcaacccgtgcaggtgcgctggctggcatctctccgatgttccaaccttgcgtagttcctcctaagccgtggactggcattactggtggtggctattgggctaacggtcgtcgtcctctggcgctggtgcgtactcacagtaagaaaggtctgatgcgctacgaagacgtttacatgcctgaggtgtacaaagcgattaacattgcgcaaaacaccgcctggtcgatcaacaagtgggtcctggcggtcgccaacgtaatcaccaagtggaagcattgtccggtccgggacatccctgcgattgagcgtgaagaactcccgatgaaaccggaagacatcgacatgaatcctgaggctctcaccgcgtggaaacgtgctaaagctgctgtgtaccgcagagacaaggctcgcaagtctcgccgtatcttgcttgagttcatgcttgagcaagccaataagtttgctaaccataaggccatctggttcccttacaacatggactggcgcggtcgtgtttacgctgtgccgatgttcaacccgcaaggtaacgatatgaccaaaggactgcttacgctggcgaaaggtaaaccaatcggtaaggaaggttactactggctgaaaatccacggtgcaaactgtgcgggtgtcgataaggttccgttccctgagcgcatcaagttcattgaggaaaaccacgagaacatcatggcttgcgctaagtctccactggagaacacttggtgggctgagcaagatagtccgttctgcttccttgcgttctgctttgagtacgctggggtacagcaccacggcctgagctataactgctcccttccgctggcgtttgacgggtcttgctctggcatccagcacttctccgcgatgctccgagatgaggtaggtggtcgcgcggttaacttgcttcctagtgaaaccgttcaggacatctacgggattgttgctaagaaagtcaacgagattctacaagcagacgcaatcaatgggaccgataacgaagtagttaccgtgaccgatgagaacgagggtgaaatctctgagaaagtcaagctgggcactaaggcactggctggtcaatggctggcttacggtgttactcgcagtgtgactaagcgttcagtcatgacgctggcttacgggtccaaagagttcggcttccgtcaacaagtgctgcgccacactattcagtgggctattgattccggcaagggtctgatgttcactcagccgaatcaggctgctggatacatggctaagctgatttgggaatctgtgagcgtgacggtggtagctgcggttgaagcaatgaactggcttaagtctgctgctaagctgctggctgctgaggtcaaagataagaagactggagagattcttcgcaagcgttgcgctgtgcattgggtaactcctgatggtttccctgtgtggcaggaatacaagaagcctattcagacgcgcttgaacctgatgttcctcggtcagttccgcttacagcctaccattaacaccaacaaagatagcgagattgatgcacgtaaacaggagtctggtatcgctcctaactttgtacacagccaagacggtagccaccttcgtaagactgtagtgtgggcacacgagaagtacggaatcgaatcttttgcactgattcacgactccttcggtaccattccggctgacgctgcgaacctgttcaaagcagtgcgcgaaactatggttgacacatatgagtcttgtgatgtactggctgatttctacgaccagttcgctgaccagttgcacgagtctcaattggacaaaatgccagcacttccggctaaaggtaacttgaacctccgtgacatcttagagtcggacttcgcgttcgcg

SEQ ID NO: 314 - protein, 890 aa, synthetic construct
  REGION 1..890: note = Variant of RNA polymerase
MHHHHHHMNTINIAKNDFSDIELAAIPFNTLADHYGEGLAREQLALEHESYEMGEARFRKMFERQLKAGEVADNAAAKPLITTLLPKMIARINDWFEEVKAKRGKRPTAFQFLQEIKPEAVAYITIKTTLACLTSADRTTVQAVASAIGRAIEDEARFGRIRDLEAKHFKKNYEEQLNKRVGHVYKKAFMQVVEADMLSKGLLGGEAWSSWHKEDSIHVGVRCIEMLIESTGMVSLHRQNAGVVGQDSETIELAPEYAEAIATRAGALAGISPMFQPCVVPPKPWTGITGGGYWANGRRPLALVRTHSKKGLMRYEDVYMPEVYKAINIAQNTAWSINKWVLAVANVITKWKHCPVRDIPAIEREELPMKPEDIDMNPEALTAWKRAKAAVYRRDKARKSRRILLEFMLEQANKFANHKAIWFPYNMDWRGRVYAVPMFNPQGNDMTKGLLTLAKGKPIGKEGYYWLKIHGANCAGVDKVPFPERIKFIEENHENIMACAKSPLENTWWAEQDSPFCFLAFCFEYAGVQHHGLSYNCSLPLAFDGSCSGIQHFSAMLRDEVGGRAVNLLPSETVQDIYGIVAKKVNEILQADAINGTDNEVVTVTDENEGEISEKVKLGTKALAGQWLAYGVTRSVTKRSVMTLAYGSKEFGFRQQVLRHTIQWAIDSGKGLMFTQPNQAAGYMAKLIWESVSVTVVAAVEAMNWLKSAAKLLAAEVKDKKTGEILRKRCAVHWVTPDGFPVWQEYKKPIQTRLNLMFLGQFRLQPTINTNKDSEIDARKQESGIAPNFVHSQDGSHLRKTVVWAHEKYGIESFALIHDSFGTIPADAANLFKAVRETMVDTYESCDVLADFYDQFADQLHESQLDKMPALPAKGNLNLRDILESDFAFA

SEQ ID NO: 315 - DNA, 2670 bp, synthetic construct
  misc_feature 1..2670: note = Variant of RNA polymerase
  source 1..2670: mol_type = other DNA
atgcaccatcaccatcaccatatgaacacgattaacatcgctaagaacgacttctctgacatcgaactggctgctatcccgttcaacactctggctgaccattacggtgagggcttagctcgcgaacagttggcccttgagcatgagtcttacgagatgggtgaagcacgtttccgcaagatgtttgagcgtcaacttaaagctggtgaggttgcggataacgctgccgccaagcctctcatcactaccctactccctaagatgattgcacgcatcaacgactggtttgaggaagtgaaagctaagcgcggcaagcgcccgacagccttccagttcctgcaagaaatcaagccggaagccgtagcgtacatcaccattaagaccactctggcttgcctaaccagtgcggaccgtacaaccgttcaggctgtagcaagcgcaatcggtcgggccattgaggacgaggctcgcttcggtcgtatccgtgaccttgaagctaagcacttcaagaaaaactatgaggaacaactcaacaagcgcgtagggcacgtctacaagaaagcatttatgcaagttgtcgaggctgacatgctctctaagggtctactcggtggcgaggcgtggtcttcgtggcataaggaagactctattcatgtaggagtacgctgcatcgagatgctcattgagtcaaccggaatggttagcttacaccgccaaaatgctggcgtagtaggtcaagactctgagactatcgaactcgcacctgaatacgctgaggctatcgcaacccgtgcaggtgcgctggctggcatctctccgatgttccaaccttgcgtagttcctcctaagccgtggactggcattactggtggtggctattgggctaacggtcgtcgtcctctggcgctggtgcgtactcacagtaagaaaggtctgatgcgctacgaagacgtttacatgcctgaggtgtacaaagcgattaacattgcgcaaaacaccgcctggtcgatcaacaagtgggtcctggcggtcgccaacgtaatcaccaagtggaagcattgtccggtccgggacatccctgcgattgagcgtgaagaactcccgatgaaaccggaagacatcgacatgaatcctgaggctctcaccgcgtggaaacgtgctaaagctgctgtgtaccgcagagacaaggctcgcaagtctcgccgtatcttgcttgagttcatgcttgagcaagccaataagtttgctaaccataaggccatctggttcccttacaacatggactggcgcggtcgtgtttacgctgtgccgatgttcaacccgcaaggtaacgatatgaccaaaggactgcttacgctggcgaaaggtaaaccaatcggtaaggaaggttactactggctgaaaatccacggtgcaaactgtgcgggtgtcgataaggttccgttccctgagcgcatcaagttcattgaggaaaaccacgagaacatcatggcttgcgctaagtctccactggagaacacttggtgggctgagcaagatagtccgttctgcttccttgcgttctgctttgagtacgctggggtacagcaccacggcctgagctataactgctcccttccgctggcgtttgacgggtcttgctctggcatccagcacttctccgcgatgctccgagatgaggtaggtggtcgcgcggttaacttgcttcctagtgaaaccgttcaggacatctacgggattgttgctaagaaagtcaacgagattctacaagcagacgcaatcaatgggaccgataacgaagtagttaccgtgaccgatgagaacactggtgaaatctctgagaaagtcaagctgggcactaaggcactggctggtcaatggctggcttacggtgttactcgcagtgtgactaagcgttcagtcatgacgctggcttacgggtccaaagagttcggcttccgtcaacaagtgctgcgccacactattcagtgggctattgattccggcaagggtctgatgttcactcagccgaatcaggctgctggatacatggctaagctgatttgggaatctgtgagcgtgacggtggtagctgcggttgaagcaatgaactggcttaagtctgctgctaagctgctggctgctgaggtctcggataagaagactggagagattcttcgcaagcgttgcgctgtgcattgggtaactcctgatggtttccctgtgtggcaggaatacaagaagcctattcagacgcgcttgaacctgatgttcctcggtcagttccgcttacagcctaccattaacaccaacaaagatagcgagattgatgcacgtaaacaggagtctggtatcgctcctaactttgtacacagccaagacggtagccaccttcgtaagactgtagtgtgggcacacgagaagtacggaatcgaatcttttgcactgattcacgactccttcggtaccattccggctgacgctgcgaacctgttcaaagcagtgcgcgaaactatggttgacacatatgagtcttgtgatgtactggctgatttctacgaccagttcgctgaccagttgcacgagtctcaattggacaaaatgccagcacttccggctaaaggtaacttgaacctccgtgacatcttagagtcggacttcgcgttcgcg

SEQ ID NO: 316 - protein, 890 aa, synthetic construct
  REGION 1..890: note = Variant of RNA polymerase
MHHHHHHMNTINIAKNDFSDIELAAIPFNTLADHYGEGLAREQLALEHESYEMGEARFRKMFERQLKAGEVADNAAAKPLITTLLPKMIARINDWFEEVKAKRGKRPTAFQFLQEIKPEAVAYITIKTTLACLTSADRTTVQAVASAIGRAIEDEARFGRIRDLEAKHFKKNYEEQLNKRVGHVYKKAFMQVVEADMLSKGLLGGEAWSSWHKEDSIHVGVRCIEMLIESTGMVSLHRQNAGVVGQDSETIELAPEYAEAIATRAGALAGISPMFQPCVVPPKPWTGITGGGYWANGRRPLALVRTHSKKGLMRYEDVYMPEVYKAINIAQNTAWSINKWVLAVANVITKWKHCPVRDIPAIEREELPMKPEDIDMNPEALTAWKRAKAAVYRRDKARKSRRILLEFMLEQANKFANHKAIWFPYNMDWRGRVYAVPMFNPQGNDMTKGLLTLAKGKPIGKEGYYWLKIHGANCAGVDKVPFPERIKFIEENHENIMACAKSPLENTWWAEQDSPFCFLAFCFEYAGVQHHGLSYNCSLPLAFDGSCSGIQHFSAMLRDEVGGRAVNLLPSETVQDIYGIVAKKVNEILQADAINGTDNEVVTVTDENTGEISEKVKLGTKALAGQWLAYGVTRSVTKRSVMTLAYGSKEFGFRQQVLRHTIQWAIDSGKGLMFTQPNQAAGYMAKLIWESVSVTVVAAVEAMNWLKSAAKLLAAEVSDKKTGEILRKRCAVHWVTPDGFPVWQEYKKPIQTRLNLMFLGQFRLQPTINTNKDSEIDARKQESGIAPNFVHSQDGSHLRKTVVWAHEKYGIESFALIHDSFGTIPADAANLFKAVRETMVDTYESCDVLADFYDQFADQLHESQLDKMPALPAKGNLNLRDILESDFAFA

SEQ ID NO: 317 - DNA, 2670 bp, synthetic construct
  misc_feature 1..2670: note = Variant of RNA polymerase
  source 1..2670: mol_type = other DNA
atgcaccatcaccatcaccatatgaacacgattaacatcgctaagaacgacttctctgacatcgaactggctgctatcccgttcaacactctggctgaccattacggtgagggcttagctcgcgaacagttggcccttgagcatgagtcttacgagatgggtgaagcacgtttccgcaagatgtttgagcgtcaacttaaagctggtgaggttgcggataacgctgccgccaagcctctcatcactaccctactccctaagatgattgcacgcatcaacgactggtttgaggaagtgaaagctaagcgcggcaagcgcccgacagccttccagttcctgcaagaaatcaagccggaagccgtagcgtacatcaccattaagaccactctggcttgcctaaccagtgcggaccgtacaaccgttcaggctgtagcaagcgcaatcggtcgggccattgaggacgaggctcgcttcggtcgtatccgtgaccttgaagctaagcacttcaagaaaaactatgaggaacaactcaacaagcgcgtagggcacgtctacaagaaagcatttatgcaagttgtcgaggctgacatgctctctaagggtctactcggtggcgaggcgtggtcttcgtggcataaggaagactctattcatgtaggagtacgctgcatcgagatgctcattgagtcaaccggaatggttagcttacaccgccaaaatgctggcgtagtaggtcaagactctgagactatcgaactcgcacctgaatacgctgaggctatcgcaacccgtgcaggtgcgctggctggcatctctccgatgttccaaccttgcgtagttcctcctaagccgtggactggcattactggtggtggctattgggctaacggtcgtcgtcctctggcgctggtgcgtactcacagtaagaaaggtctgatgcgctacgaagacgtttacatgcctgaggtgtacaaagcgattaacattgcgcaaaacaccgcctggtcgatcaacaagtgggtcctggcggtcgccaacgtaatcaccaagtggaagcattgtccggtccgggacatccctgcgattgagcgtgaagaactcccgatgaaaccggaagacatcgacatgaatcctgaggctctcaccgcgtggaaacgtgctaaagctgctgtgtaccgcagagacaaggctcgcaagtctcgccgtatcttgcttgagttcatgcttgagcaagccaataagtttgctaaccataaggccatctggttcccttacaacatggactggcgcggtcgtgtttacgctgtgccgatgttcaacccgcaaggtaacgatatgaccaaaggactgcttacgctggcgaaaggtaaaccaatcggtaaggaaggttactactggctgaaaatccacggtgcaaactgtgcgggtgtcgataaggttccgttccctgagcgcatcaagttcattgaggaaaaccacgagaacatcatggcttgcgctaagtctccactggagaacacttggtgggctgagcaagatagtccgttctgcttccttgcgttctgctttgagtacgctggggtacagcaccacggcctgagctataactgctcccttccgctggcgtttgacgggtcttgctctggcatccagcacttctccgcgatgctccgagatgaggtaggtggtcgcgcggttaacttgcttcctagtgaaaccgttcaggacatctacgggattgttgctaagaaagtcaacgagattctacaagcagacgcaatcaatgggaccgataacgaagtagttaccgtgaccgatgagaactgtggtgaaatctctgagaaagtcaagctgggcactaaggcactggctggtcaatggctggcttacggtgttactcgcagtgtgactaagcgttcagtcatgacgctggcttacgggtccaaagagttcggcttccgtcaacaagtgctgcgccacactattcagtgggctattgattccggcaagggtctgatgttcactcagccgaatcaggctgctggatacatggctaagctgatttgggaatctgtgagcgtgacggtggtagctgcggttgaagcaatgaactggcttaagtctgctgctaagctgctggctgctgaggtcaaagataagaagactggagagattcttcgcaagcgttgcgctgtgcattgggtaactcctgatggtttccctgtgtggcaggaatacaagaagcctattcagacgcgcttgaacctgatgttcctcggtcagttccgcttacagcctaccattaacaccaacaaagatagcgagattgatgcacgtaaacaggagtctggtatcgctcctaactttgtacacagccaagacggtagccaccttcgtaagactgtagtgtgggcacacgagaagtacggaatcgaatcttttgcactgattcacgactccttcggtaccattccggctgacgctgcgaacctgttcaaagcagtgcgcgaaactatggttgacacatatgagtcttgtgatgtactggctgatttctacgaccagttcgctgaccagttgcacgagtctcaattggacaaaatgccagcacttccggctaaaggtaacttgaacctccgtgacatcttagagtcggacttcgcgttcgcg

SEQ ID NO: 318 - protein, 890 aa, synthetic construct
  REGION 1..890: note = Variant of RNA polymerase
MHHHHHHMNTINIAKNDFSDIELAAIPFNTLADHYGEGLAREQLALEHESYEMGEARFRKMFERQLKAGEVADNAAAKPLITTLLPKMIARINDWFEEVKAKRGKRPTAFQFLQEIKPEAVAYITIKTTLACLTSADRTTVQAVASAIGRAIEDEARFGRIRDLEAKHFKKNYEEQLNKRVGHVYKKAFMQVVEADMLSKGLLGGEAWSSWHKEDSIHVGVRCIEMLIESTGMVSLHRQNAGVVGQDSETIELAPEYAEAIATRAGALAGISPMFQPCVVPPKPWTGITGGGYWANGRRPLALVRTHSKKGLMRYEDVYMPEVYKAINIAQNTAWSINKWVLAVANVITKWKHCPVRDIPAIEREELPMKPEDIDMNPEALTAWKRAKAAVYRRDKARKSRRILLEFMLEQANKFANHKAIWFPYNMDWRGRVYAVPMFNPQGNDMTKGLLTLAKGKPIGKEGYYWLKIHGANCAGVDKVPFPERIKFIEENHENIMACAKSPLENTWWAEQDSPFCFLAFCFEYAGVQHHGLSYNCSLPLAFDGSCSGIQHFSAMLRDEVGGRAVNLLPSETVQDIYGIVAKKVNEILQADAINGTDNEVVTVTDENCGEISEKVKLGTKALAGQWLAYGVTRSVTKRSVMTLAYGSKEFGFRQQVLRHTIQWAIDSGKGLMFTQPNQAAGYMAKLIWESVSVTVVAAVEAMNWLKSAAKLLAAEVKDKKTGEILRKRCAVHWVTPDGFPVWQEYKKPIQTRLNLMFLGQFRLQPTINTNKDSEIDARKQESGIAPNFVHSQDGSHLRKTVVWAHEKYGIESFALIHDSFGTIPADAANLFKAVRETMVDTYESCDVLADFYDQFADQLHESQLDKMPALPAKGNLNLRDILESDFAFA

SEQ ID NO: 319 - DNA, 2670 bp, synthetic construct
  misc_feature 1..2670: note = Variant of RNA polymerase
  source 1..2670: mol_type = other DNA
atgcaccatcaccatcaccatatgaacacgattaacatcgctaagaacgacttctctgacatcgaactggctgctatcccgttcaacactctggctgaccattacggtgagggcttagctcgcgaacagttggcccttgagcatgagtcttacgagatgggtgaagcacgtttccgcaagatgtttgagcgtcaacttaaagctggtgaggttgcggataacgctgccgccaagcctctcatcactaccctactccctaagatgattgcacgcatcaacgactggtttgaggaagtgaaagctaagcgcggcaagcgcccgacagccttccagttcctgcaagaaatcaagccggaagccgtagcgtacatcaccattaagaccactctggcttgcctaaccagtgcggaccgtacaaccgttcaggctgtagcaagcgcaatcggtcgggccattgaggacgaggctcgcttcggtcgtatccgtgaccttgaagctaagcacttcaagaaaaactatgaggaacaactcaacaagcgcgtagggcacgtctacaagaaagcatttatgcaagttgtcgaggctgacatgctctctaagggtctactcggtggcgaggcgtggtcttcgtggcataaggaagactctattcatgtaggagtacgctgcatcgagatgctcattgagtcaaccggaatggttagcttacaccgccaaaatgctggcgtagtaggtcaagactctgagactatcgaactcgcacctgaatacgctgaggctatcgcaacccgtgcaggtgcgctggctggcatctctccgatgttccaaccttgcgtagttcctcctaagccgtggactggcattactggtggtggctattgggctaacggtcgtcgtcctctggcgctggtgcgtactcacagtaagaaaggtctgatgcgctacgaagacgtttacatgcctgaggtgtacaaagcgattaacattgcgcaaaacaccgcctggtcgatcaacaagtgggtcctggcggtcgccaacgtaatcaccaagtggaagcattgtccggtccgggacatccctgcgattgagcgtgaagaactcccgatgaaaccggaagacatcgacatgaatcctgaggctctcaccgcgtggaaacgtgctaaagctgctgtgtaccgcagagacaaggctcgcaagtctcgccgtatcttgcttgagttcatgcttgagcaagccaataagtttgctaaccataaggccatctggttcccttacaacatggactggcgcggtcgtgtttacgctgtgccgatgttcaacccgcaaggtaacgatatgaccaaaggactgcttacgctggcgaaaggtaaaccaatcggtaaggaaggttactactggctgaaaatccacggtgcaaactgtgcgggtgtcgataaggttccgttccctgagcgcatcaagttcattgaggaaaaccacgagaacatcatggcttgcgctaagtctccactggagaacacttggtgggctgagcaagatagtccgttctgcttccttgcgttctgctttgagtacgctggggtacagcaccacggcctgagctataactgctcccttccgctggcgtttgacgggtcttgctctggcatccagcacttctccgcgatgctccgagatgaggtaggtggtcgcgcggttaacttgcttcctagtgaaaccgttcaggacatctacgggattgttgctaagaaagtcaacgagattctacaagcagacgcaatcaatgggaccgataacgaagtagttaccgtgaccgatgagaacccgggtgaaatctctgagaaagtcaagctgggcactaaggcactggctggtcaatggctggcttacggtgttactcgcagtgtgactaagcgttcagtcatgacgctggcttacgggtccaaagagttcggcttccgtcaacaagtgctgcgccacactattcagtgggctattgattccggcaagggtctgatgttcactcagccgaatcaggctgctggatacatggctaagctgatttgggaatctgtgagcgtgacggtggtagctgcggttgaagcaatgaactggcttaagtctgctgctaagctgctggctgctgaggtcaaagataagaagactggagagattcttcgcaagcgttgcgctgtgcattgggtaactcctgatggtttccctgtgtggcaggaatacaagaagcctattcagacgcgcttgaacctgatgttcctcggtcagttccgcttacagcctaccattaacaccaacaaagatagcgagattgatgcacgtaaacaggagtctggtatcgctcctaactttgtacacagccaagacggtagccaccttcgtaagactgtagtgtgggcacacgagaagtacggaatcgaatcttttgcactgattcacgactccttcggtaccattccggctgacgctgcgaacctgttcaaagcagtgcgcgaaactatggttgacacatatgagtcttgtgatgtactggctgatttctacgaccagttcgctgaccagttgcacgagtctcaattggacaaaatgccagcacttccggctaaaggtaacttgaacctccgtgacatcttagagtcggacttcgcgttcgcg

SEQ ID NO: 320 - protein, 890 aa, synthetic construct
  REGION 1..890: note = Variant of RNA polymerase
MHHHHHHMNTINIAKNDFSDIELAAIPFNTLADHYGEGLAREQLALEHESYEMGEARFRKMFERQLKAGEVADNAAAKPLITTLLPKMIARINDWFEEVKAKRGKRPTAFQFLQEIKPEAVAYITIKTTLACLTSADRTTVQAVASAIGRAIEDEARFGRIRDLEAKHFKKNYEEQLNKRVGHVYKKAFMQVVEADMLSKGLLGGEAWSSWHKEDSIHVGVRCIEMLIESTGMVSLHRQNAGVVGQDSETIELAPEYAEAIATRAGALAGISPMFQPCVVPPKPWTGITGGGYWANGRRPLALVRTHSKKGLMRYEDVYMPEVYKAINIAQNTAWSINKWVLAVANVITKWKHCPVRDIPAIEREELPMKPEDIDMNPEALTAWKRAKAAVYRRDKARKSRRILLEFMLEQANKFANHKAIWFPYNMDWRGRVYAVPMFNPQGNDMTKGLLTLAKGKPIGKEGYYWLKIHGANCAGVDKVPFPERIKFIEENHENIMACAKSPLENTWWAEQDSPFCFLAFCFEYAGVQHHGLSYNCSLPLAFDGSCSGIQHFSAMLRDEVGGRAVNLLPSETVQDIYGIVAKKVNEILQADAINGTDNEVVTVTDENPGEISEKVKLGTKALAGQWLAYGVTRSVTKRSVMTLAYGSKEFGFRQQVLRHTIQWAIDSGKGLMFTQPNQAAGYMAKLIWESVSVTVVAAVEAMNWLKSAAKLLAAEVKDKKTGEILRKRCAVHWVTPDGFPVWQEYKKPIQTRLNLMFLGQFRLQPTINTNKDSEIDARKQESGIAPNFVHSQDGSHLRKTVVWAHEKYGIESFALIHDSFGTIPADAANLFKAVRETMVDTYESCDVLADFYDQFADQLHESQLDKMPALPAKGNLNLRDILESDFAFA

SEQ ID NO: 321 - DNA, 2670 bp, synthetic construct
  misc_feature 1..2670: note = Variant of RNA polymerase
  source 1..2670: mol_type = other DNA
atgcaccatcaccatcaccatatgaacacgattaacatcgctaagaacgacttctctgacatcgaactggctgctatcccgttcaacactctggctgaccattacggtgagggcttagctcgcgaacagttggcccttgagcatgagtcttacgagatgggtgaagcacgtttccgcaagatgtttgagcgtcaacttaaagctggtgaggttgcggataacgctgccgccaagcctctcatcactaccctactccctaagatgattgcacgcatcaacgactggtttgaggaagtgaaagctaagcgcggcaagcgcccgacagccttccagttcctgcaagaaatcaagccggaagccgtagcgtacatcaccattaagaccactctggcttgcctaaccagtgcggaccgtacaaccgttcaggctgtagcaagcgcaatcggtcgggccattgaggacgaggctcgcttcggtcgtatccgtgaccttgaagctaagcacttcaagaaaaactatgaggaacaactcaacaagcgcgtagggcacgtctacaagaaagcatttatgcaagttgtcgaggctgacatgctctctaagggtctactcggtggcgaggcgtggtcttcgtggcataaggaagactctattcatgtaggagtacgctgcatcgagatgctcattgagtcaaccggaatggttagcttacaccgccaaaatgctggcgtagtaggtcaagactctgagactatcgaactcgcacctgaatacgctgaggctatcgcaacccgtgcaggtgcgctggctggcatctctccgatgttccaaccttgcgtagttcctcctaagccgtggactggcattactggtggtggctattgggctaacggtcgtcgtcctctggcgctggtgcgtactcacagtaagaaaggtctgatgcgctacgaagacgtttacatgcctgaggtgtacaaagcgattaacattgcgcaaaacaccgcctggtcgatcaacaagtgggtcctggcggtcgccaacgtaatcaccaagtggaagcattgtccggtccgggacatccctgcgattgagcgtgaagaactcccgatgaaaccggaagacatcgacatgaatcctgaggctctcaccgcgtggaaacgtgctaaagctgctgtgtaccgcagagacaaggctcgcaagtctcgccgtatcttgcttgagttcatgcttgagcaagccaataagtttgctaaccataaggccatctggttcccttacaacatggactggcgcggtcgtgtttacgctgtgccgatgttcaacccgcaaggtaacgatatgaccaaaggactgcttacgctggcgaaaggtaaaccaatcggtaaggaaggttactactggctgaaaatccacggtgcaaactgtgcgggtgtcgataaggttccgttccctgagcgcatcaagttcattgaggaaaaccacgagaacatcatggcttgcgctaagtctccactggagaacacttggtgggctgagcaagatagtccgttctgcttccttgcgttctgctttgagtacgctggggtacagcaccacggcctgagctataactgctcccttccgctggcgtttgacgggtcttgctctggcatccagcacttctccgcgatgctccgagatgaggtaggtggtcgcgcggttaacttgcttcctagtgaaaccgttcaggacatctacgggattgttgctaagaaagtcaacgagattctacaagcagacgcaatcaatgggaccgataacgaagtagttaccgtgaccgatgagaacactggtgaaatctctgagaaagtcaagctgggcactaaggcactggctggtcaatggctggcttacggtgttactcgcagtgtgactaagcgttcagtcatgacgctggcttacgggtccaaagagttcggcttccgtcaacaagtgctgcgccacactattcagtgggctattgattccggcaagggtctgatgttcactcagccgaatcaggctgctggatacatggctaagctgatttgggaatctgtgagcgtgacggtggtagctgcggttgaagcaatgaactggcttaagtctgctgctaagctgctggctgctgaggtcaaagataagatgactggagagattcttcgcaagcgttgcgctgtgcattgggtaactcctgatggtttccctgtgtggcaggaatacaagaagcctattcagacgcgcttgaacctgatgttcctcggtcagttccgcttacagcctaccattaacaccaacaaagatagcgagattgatgcacgtaaacaggagtctggtatcgctcctaactttgtacacagccaagacggtagccaccttcgtaagactgtagtgtgggcacacgagaagtacggaatcgaatcttttgcactgattcacgactccttcggtaccattccggctgacgctgcgaacctgttcaaagcagtgcgcgaaactatggttgacacatatgagtcttgtgatgtactggctgatttctacgaccagttcgctgaccagttgcacgagtctcaattggacaaaatgccagcacttccggctaaaggtaacttgaacctccgtgacatcttagagtcggacttcgcgttcgcg

SEQ ID NO: 322 - protein, 890 aa, synthetic construct
  REGION 1..890: note = Variant of RNA polymerase
MHHHHHHMNTINIAKNDFSDIELAAIPFNTLADHYGEGLAREQLALEHESYEMGEARFRKMFERQLKAGEVADNAAAKPLITTLLPKMIARINDWFEEVKAKRGKRPTAFQFLQEIKPEAVAYITIKTTLACLTSADRTTVQAVASAIGRAIEDEARFGRIRDLEAKHFKKNYEEQLNKRVGHVYKKAFMQVVEADMLSKGLLGGEAWSSWHKEDSIHVGVRCIEMLIESTGMVSLHRQNAGVVGQDSETIELAPEYAEAIATRAGALAGISPMFQPCVVPPKPWTGITGGGYWANGRRPLALVRTHSKKGLMRYEDVYMPEVYKAINIAQNTAWSINKWVLAVANVITKWKHCPVRDIPAIEREELPMKPEDIDMNPEALTAWKRAKAAVYRRDKARKSRRILLEFMLEQANKFANHKAIWFPYNMDWRGRVYAVPMFNPQGNDMTKGLLTLAKGKPIGKEGYYWLKIHGANCAGVDKVPFPERIKFIEENHENIMACAKSPLENTWWAEQDSPFCFLAFCFEYAGVQHHGLSYNCSLPLAFDGSCSGIQHFSAMLRDEVGGRAVNLLPSETVQDIYGIVAKKVNEILQADAINGTDNEVVTVTDENTGEISEKVKLGTKALAGQWLAYGVTRSVTKRSVMTLAYGSKEFGFRQQVLRHTIQWAIDSGKGLMFTQPNQAAGYMAKLIWESVSVTVVAAVEAMNWLKSAAKLLAAEVKDKMTGEILRKRCAVHWVTPDGFPVWQEYKKPIQTRLNLMFLGQFRLQPTINTNKDSEIDARKQESGIAPNFVHSQDGSHLRKTVVWAHEKYGIESFALIHDSFGTIPADAANLFKAVRETMVDTYESCDVLADFYDQFADQLHESQLDKMPALPAKGNLNLRDILESDFAFA

SEQ ID NO: 323 - DNA, 2670 bp, synthetic construct
  misc_feature 1..2670: note = Variant of RNA polymerase
  source 1..2670: mol_type = other DNA
atgcaccatcaccatcaccatatgaacacgattaacatcgctaagaacgacttctctgacatcgaactggctgctatcccgttcaacactctggctgaccattacggtgagggcttagctcgcgaacagttggcccttgagcatgagtcttacgagatgggtgaagcacgtttccgcaagatgtttgagcgtcaacttaaagctggtgaggttgcggataacgctgccgccaagcctctcatcactaccctactccctaagatgattgcacgcatcaacgactggtttgaggaagtgaaagctaagcgcggcaagcgcccgacagccttccagttcctgcaagaaatcaagccggaagccgtagcgtacatcaccattaagaccactctggcttgcctaaccagtgcggaccgtacaaccgttcaggctgtagcaagcgcaatcggtcgggccattgaggacgaggctcgcttcggtcgtatccgtgaccttgaagctaagcacttcaagaaaaactatgaggaacaactcaacaagcgcgtagggcacgtctacaagaaagcatttatgcaagttgtcgaggctgacatgctctctaagggtctactcggtggcgaggcgtggtcttcgtggcataaggaagactctattcatgtaggagtacgctgcatcgagatgctcattgagtcaaccggaatggttagcttacaccgccaaaatgctggcgtagtaggtcaagactctgagactatcgaactcgcacctgaatacgctgaggctatcgcaacccgtgcaggtgcgctggctggcatctctccgatgttccaaccttgcgtagttcctcctaagccgtggactggcattactggtggtggctattgggctaacggtcgtcgtcctctggcgctggtgcgtactcacagtaagaaaggtctgatgcgctacgaagacgtttacatgcctgaggtgtacaaagcgattaacattgcgcaaaacaccgcctggtcgatcaacaagtgggtcctggcggtcgccaacgtaatcaccaagtggaagcattgtccggtccgggacatccctgcgattgagcgtgaagaactcccgatgaaaccggaagacatcgacatgaatcctgaggctctcaccgcgtggaaacgtgctaaagctgctgtgtaccgcagagacaaggctcgcaagtctcgccgtatcttgcttgagttcatgcttgagcaagccaataagtttgctaaccataaggccatctggttcccttacaacatggactggcgcggtcgtgtttacgctgtgccgatgttcaacccgcaaggtaacgatatgaccaaaggactgcttacgctggcgaaaggtaaaccaatcggtaaggaaggttactactggctgaaaatccacggtgcaaactgtgcgggtgtcgataaggttccgttccctgagcgcatcaagttcattgaggaaaaccacgagaacatcatggcttgcgctaagtctccactggagaacacttggtgggctgagcaagatagtccgttctgcttccttgcgttctgctttgagtacgctggggtacagcaccacggcctgagctataactgctcccttccgctggcgtttgacgggtcttgctctggcatccagcacttctccgcgatgctccgagatgaggtaggtggtcgcgcggttaacttgcttcctagtgaaaccgttcaggacatctacgggattgttgctaagaaagtcaacgagattctacaagcagacgcaatcaatgggaccgataacgaagtagttaccgtgaccgatgagaacactggtgaaatctctgaggctgtcaagctgggcactaaggcactggctggtcaatggctggcttacggtgttactcgcagtgtgactaagcgttcagtcatgacgctggcttacgggtccaaagagttcggcttccgtcaacaagtgctgcgccacactattcagtgggctattgattccggcaagggtctgatgttcactcagccgaatcaggctgctggatacatggctaagctgatttgggaatctgtgagcgtgacggtggtagctgcggttgaagcaatgaactggcttaagtctgctgctaagctgctggctgctgaggtcaaagataagaagactggagagattcttcgcaagcgttgcgctgtgcattgggtaactcctgatggtttccctgtgtggcaggaatacaagaagcctattcagacgcgcttgaacctgatgttcctcggtcagttccgcttacagcctaccattaacaccaacaaagatagcgagattgatgcacgtaaacaggagtctggtatcgctcctaactttgtacacagccaagacggtagccaccttcgtaagactgtagtgtgggcacacgagaagtacggaatcgaatcttttgcactgattcacgactccttcggtaccattccggctgacgctgcgaacctgttcaaagcagtgcgcgaaactatggttgacacatatgagtcttgtgatgtactggctgatttctacgaccagttcgctgaccagttgcacgagtctcaattggacaaaatgccagcacttccggctaaaggtaacttgaacctccgtgacatcttagagtcggacttcgcgttcgcg

SEQ ID NO: 324 - protein, 890 aa, synthetic construct
  REGION 1..890: note = Variant of RNA polymerase
MHHHHHHMNTINIAKNDFSDIELAAIPFNTLADHYGEGLAREQLALEHESYEMGEARFRKMFERQLKAGEVADNAAAKPLITTLLPKMIARINDWFEEVKAKRGKRPTAFQFLQEIKPEAVAYITIKTTLACLTSADRTTVQAVASAIGRAIEDEARFGRIRDLEAKHFKKNYEEQLNKRVGHVYKKAFMQVVEADMLSKGLLGGEAWSSWHKEDSIHVGVRCIEMLIESTGMVSLHRQNAGVVGQDSETIELAPEYAEAIATRAGALAGISPMFQPCVVPPKPWTGITGGGYWANGRRPLALVRTHSKKGLMRYEDVYMPEVYKAINIAQNTAWSINKWVLAVANVITKWKHCPVRDIPAIEREELPMKPEDIDMNPEALTAWKRAKAAVYRRDKARKSRRILLEFMLEQANKFANHKAIWFPYNMDWRGRVYAVPMFNPQGNDMTKGLLTLAKGKPIGKEGYYWLKIHGANCAGVDKVPFPERIKFIEENHENIMACAKSPLENTWWAEQDSPFCFLAFCFEYAGVQHHGLSYNCSLPLAFDGSCSGIQHFSAMLRDEVGGRAVNLLPSETVQDIYGIVAKKVNEILQADAINGTDNEVVTVTDENTGEISEAVKLGTKALAGQWLAYGVTRSVTKRSVMTLAYGSKEFGFRQQVLRHTIQWAIDSGKGLMFTQPNQAAGYMAKLIWESVSVTVVAAVEAMNWLKSAAKLLAAEVKDKKTGEILRKRCAVHWVTPDGFPVWQEYKKPIQTRLNLMFLGQFRLQPTINTNKDSEIDARKQESGIAPNFVHSQDGSHLRKTVVWAHEKYGIESFALIHDSFGTIPADAANLFKAVRETMVDTYESCDVLADFYDQFADQLHESQLDKMPALPAKGNLNLRDILESDFAFA

SEQ ID NO: 325 - DNA, 2670 bp, synthetic construct
  misc_feature 1..2670: note = Variant of RNA polymerase
  source 1..2670: mol_type = other DNA
atgcaccatcaccatcaccatatgaacacgattaacatcgctaagaacgacttctctgacatcgaactggctgctatcccgttcaacactctggctgaccattacggtgagggcttagctcgcgaacagttggcccttgagcatgagtcttacgagatgggtgaagcacgtttccgcaagatgtttgagcgtcaacttaaagctggtgaggttgcggataacgctgccgccaagcctctcatcactaccctactccctaagatgattgcacgcatcaacgactggtttgaggaagtgaaagctaagcgcggcaagcgcccgacagccttccagttcctgcaagaaatcaagccggaagccgtagcgtacatcaccattaagaccactctggcttgcctaaccagtgcggaccgtacaaccgttcaggctgtagcaagcgcaatcggtcgggccattgaggacgaggctcgcttcggtcgtatccgtgaccttgaagctaagcacttcaagaaaaactatgaggaacaactcaacaagcgcgtagggcacgtctacaagcatgcatttatgcaagttgtcgaggctgacatgctctctaagggtctactcggtggcgaggcgtggtcttcgtggcataaggaagactctattcatgtaggagtacgctgcatcgagatgctcattgagtcaaccggaatggttagcttacaccgccaaaatgctggcgtagtaggtcaagactctgagactatcgaactcgcacctgaatacgctgaggctatcgcaacccgtgcaggtgcgctggctggcatctctccgatgttccaaccttgcgtagttcctcctaagccgtggactggcattactggtggtggctattgggctaacggtcgtcgtcctctggcgctggtgcgtactcacagtaagaaaggtctgatgcgctacgaagacgtttacatgcctgaggtgtacaaagcgattaacattgcgcaaaacaccgcctggtcgatcaacaagtgggtcctggcggtcgccaacgtaatcaccaagtggaagcattgtccggtccgggacatccctgcgattgagcgtgaagaactcccgatgaaaccggaagacatcgacatgaatcctgaggctctcaccgcgtggaaacgtgctaaagctgctgtgtaccgcagagacaaggctcgcaagtctcgccgtatcttgcttgagttcatgcttgagcaagccaataagtttgctaaccataaggccatctggttcccttacaacatggactggcgcggtcgtgtttacgctgtgccgatgttcaacccgcaaggtaacgatatgaccaaaggactgcttacgctggcgaaaggtaaaccaatcggtaaggaaggttactactggctgaaaatccacggtgcaaactgtgcgggtgtcgataaggttccgttccctgagcgcatcaagttcattgaggaaaaccacgagaacatcatggcttgcgctaagtctccactggagaacacttggtgggctgagcaagatagtccgttctgcttccttgcgttctgctttgagtacgctggggtacagcaccacggcctgagctataactgctcccttccgctggcgtttgacgggtcttgctctggcatccagcacttctccgcgatgctccgagatgaggtaggtggtcgcgcggttaacttgcttcctagtgaaaccgttcaggacatctacgggattgttgctaagaaagtcaacgagattctacaagcagacgcaatcaatgggaccgataacgaagtagttaccgtgaccgatgagaacactggtgaaatctctgagaaagtcaagctgggcactaaggcactggctggtcaatggctggcttacggtgttactcgcagtgtgactaagcgttcagtcatgacgctggcttacgggtccaaagagttcggcttccgtcaacaagtgctgcgccacactattcagtgggctattgattccggcaagggtctgatgttcactcagccgaatcaggctgctggatacatggctaagctgatttgggaatctgtgagcgtgacggtggtagctgcggttgaagcaatgaactggcttaagtctgctgctaagctgctggctgctgaggtcaaagataagaagactggagagattcttcgcaagcgttgcgctgtgcattgggtaactcctgatggtttccctgtgtggcaggaatacaagaagcctattcagacgcgcttgaacctgatgttcctcggtcagttccgcttacagcctaccattaacaccaacaaagatagcgagattgatgcacgtaaacaggagtctggtatcgctcctaactttgtacacagccaagacggtagccaccttcgtaagactgtagtgtgggcacacgagaagtacggaatcgaatcttttgcactgattcacgactccttcggtaccattccggctgacgctgcgaacctgttcaaagcagtgcgcgaaactatggttgacacatatgagtcttgtgatgtactggctgatttctacgaccagttcgctgaccagttgcacgagtctcaattggacaaaatgccagcacttccggctaaaggtaacttgaacctccgtgacatcttagagtcggacttcgcgttcgcg

SEQ ID NO: 326 - protein, 890 aa, synthetic construct
  REGION 1..890: note = Variant of RNA polymerase
MHHHHHHMNTINIAKNDFSDIELAAIPFNTLADHYGEGLAREQLALEHESYEMGEARFRKMFERQLKAGEVADNAAAKPLITTLLPKMIARINDWFEEVKAKRGKRPTAFQFLQEIKPEAVAYITIKTTLACLTSADRTTVQAVASAIGRAIEDEARFGRIRDLEAKHFKKNYEEQLNKRVGHVYKHAFMQVVEADMLSKGLLGGEAWSSWHKEDSIHVGVRCIEMLIESTGMVSLHRQNAGVVGQDSETIELAPEYAEAIATRAGALAGISPMFQPCVVPPKPWTGITGGGYWANGRRPLALVRTHSKKGLMRYEDVYMPEVYKAINIAQNTAWSINKWVLAVANVITKWKHCPVRDIPAIEREELPMKPEDIDMNPEALTAWKRAKAAVYRRDKARKSRRILLEFMLEQANKFANHKAIWFPYNMDWRGRVYAVPMFNPQGNDMTKGLLTLAKGKPIGKEGYYWLKIHGANCAGVDKVPFPERIKFIEENHENIMACAKSPLENTWWAEQDSPFCFLAFCFEYAGVQHHGLSYNCSLPLAFDGSCSGIQHFSAMLRDEVGGRAVNLLPSETVQDIYGIVAKKVNEILQADAINGTDNEVVTVTDENTGEISEKVKLGTKALAGQWLAYGVTRSVTKRSVMTLAYGSKEFGFRQQVLRHTIQWAIDSGKGLMFTQPNQAAGYMAKLIWESVSVTVVAAVEAMNWLKSAAKLLAAEVKDKKTGEILRKRCAVHWVTPDGFPVWQEYKKPIQTRLNLMFLGQFRLQPTINTNKDSEIDARKQESGIAPNFVHSQDGSHLRKTVVWAHEKYGIESFALIHDSFGTIPADAANLFKAVRETMVDTYESCDVLADFYDQFADQLHESQLDKMPALPAKGNLNLRDILESDFAFA

SEQ ID NO: 327 - DNA, 2670 bp, synthetic construct
  misc_feature 1..2670: note = Variant of RNA polymerase
  source 1..2670: mol_type = other DNA
atgcaccatcaccatcaccatatgaacacgattaacatcgctaagaacgacttctctgacatcgaactggctgctatcccgttcaacactctggctgaccattacggtgagggcttagctcgcgaacagttggcccttgagcatgagtcttacgagatgggtgaagcacgtttccgcaagatgtttgagcgtcaacttaaagctggtgaggttgcggataacgctgccgccaagcctctcatcactaccctactccctaagatgattgcacgcatcaacgactggtttgaggaagtgaaagctaagcgcggcaagcgcccgacagccttccagttcctgcaagaaatcaagccggaagccgtagcgtacatcaccattaagaccactctggcttgcctaaccagtgcggaccgtacaaccgttcaggctgtagcaagcgcaatcggtcgggccattgaggacgaggctcgcttcggtcgtatccgtgaccttgaagctaagcacttcaagaaaaactatgaggaacaactcaacaagcgcgtagggcacgtctacaagaaagcatttatgcaagttgtcgaggcttctatgctctctaagggtctactcggtggcgaggcgtggtcttcgtggcataaggaagactctattcatgtaggagtacgctgcatcgagatgctcattgagtcaaccggaatggttagcttacaccgccaaaatgctggcgtagtaggtcaagactctgagactatcgaactcgcacctgaatacgctgaggctatcgcaacccgtgcaggtgcgctggctggcatctctccgatgttccaaccttgcgtagttcctcctaagccgtggactggcattactggtggtggctattgggctaacggtcgtcgtcctctggcgctggtgcgtactcacagtaagaaaggtctgatgcgctacgaagacgtttacatgcctgaggtgtacaaagcgattaacattgcgcaaaacaccgcctggtcgatcaacaagtgggtcctggcggtcgccaacgtaatcaccaagtggaagcattgtccggtccgggacatccctgcgattgagcgtgaagaactcccgatgaaaccggaagacatcgacatgaatcctgaggctctcaccgcgtggaaacgtgctaaagctgctgtgtaccgcagagacaaggctcgcaagtctcgccgtatcttgcttgagttcatgcttgagcaagccaataagtttgctaaccataaggccatctggttcccttacaacatggactggcgcggtcgtgtttacgctgtgccgatgttcaacccgcaaggtaacgatatgaccaaaggactgcttacgctggcgaaaggtaaaccaatcggtaaggaaggttactactggctgaaaatccacggtgcaaactgtgcgggtgtcgataaggttccgttccctgagcgcatcaagttcattgaggaaaaccacgagaacatcatggcttgcgctaagtctccactggagaacacttggtgggctgagcaagatagtccgttctgcttccttgcgttctgctttgagtacgctggggtacagcaccacggcctgagctataactgctcccttccgctggcgtttgacgggtcttgctctggcatccagcacttctccgcgatgctccgagatgaggtaggtggtcgcgcggttaacttgcttcctagtgaaaccgttcaggacatctacgggattgttgctaagaaagtcaacgagattctacaagcagacgcaatcaatgggaccgataacgaagtagttaccgtgaccgatgagaacactggtgaaatctctgagaaagtcaagctgggcactaaggcactggctggtcaatggctggcttacggtgttactcgcagtgtgactaagcgttcagtcatgacgctggcttacgggtccaaagagttcggcttccgtcaacaagtgctgcgccacactattcagtgggctattgattccggcaagggtctgatgttcactcagccgaatcaggctgctggatacatggctaagctgatttgggaatctgtgagcgtgacggtggtagctgcggttgaagcaatgaactggcttaagtctgctgctaagctgctggctgctgaggtcaaagataagaagactggagagattcttcgcaagcgttgcgctgtgcattgggtaactcctgatggtttccctgtgtggcaggaatacaagaagcctattcagacgcgcttgaacctgatgttcctcggtcagttccgcttacagcctaccattaacaccaacaaagatagcgagattgatgcacgtaaacaggagtctggtatcgctcctaactttgtacacagccaagacggtagccaccttcgtaagactgtagtgtgggcacacgagaagtacggaatcgaatcttttgcactgattcacgactccttcggtaccattccggctgacgctgcgaacctgttcaaagcagtgcgcgaaactatggttgacacatatgagtcttgtgatgtactggctgatttctacgaccagttcgctgaccagttgcacgagtctcaattggacaaaatgccagcacttccggctaaaggtaacttgaacctccgtgacatcttagagtcggacttcgcgttcgcg

SEQ ID NO: 328 - protein, 890 aa, synthetic construct
  REGION 1..890: note = Variant of RNA polymerase
MHHHHHHMNTINIAKNDFSDIELAAIPFNTLADHYGEGLAREQLALEHESYEMGEARFRKMFERQLKAGEVADNAAAKPLITTLLPKMIARINDWFEEVKAKRGKRPTAFQFLQEIKPEAVAYITIKTTLACLTSADRTTVQAVASAIGRAIEDEARFGRIRDLEAKHFKKNYEEQLNKRVGHVYKKAFMQVVEASMLSKGLLGGEAWSSWHKEDSIHVGVRCIEMLIESTGMVSLHRQNAGVVGQDSETIELAPEYAEAIATRAGALAGISPMFQPCVVPPKPWTGITGGGYWANGRRPLALVRTHSKKGLMRYEDVYMPEVYKAINIAQNTAWSINKWVLAVANVITKWKHCPVRDIPAIEREELPMKPEDIDMNPEALTAWKRAKAAVYRRDKARKSRRILLEFMLEQANKFANHKAIWFPYNMDWRGRVYAVPMFNPQGNDMTKGLLTLAKGKPIGKEGYYWLKIHGANCAGVDKVPFPERIKFIEENHENIMACAKSPLENTWWAEQDSPFCFLAFCFEYAGVQHHGLSYNCSLPLAFDGSCSGIQHFSAMLRDEVGGRAVNLLPSETVQDIYGIVAKKVNEILQADAINGTDNEVVTVTDENTGEISEKVKLGTKALAGQWLAYGVTRSVTKRSVMTLAYGSKEFGFRQQVLRHTIQWAIDSGKGLMFTQPNQAAGYMAKLIWESVSVTVVAAVEAMNWLKSAAKLLAAEVKDKKTGEILRKRCAVHWVTPDGFPVWQEYKKPIQTRLNLMFLGQFRLQPTINTNKDSEIDARKQESGIAPNFVHSQDGSHLRKTVVWAHEKYGIESFALIHDSFGTIPADAANLFKAVRETMVDTYESCDVLADFYDQFADQLHESQLDKMPALPAKGNLNLRDILESDFAFA

SEQ ID NO: 329 - DNA, 2670 bp, synthetic construct
  misc_feature 1..2670: note = Variant of RNA polymerase
  source 1..2670: mol_type = other DNA
atgcaccatcaccatcaccatatgaacacgattaacatcgctaagaacgacttctctgacatcgaactggctgctatcccgttcaacactctggctgaccattacggtgagggcttagctcgcgaacagttggcccttgagcatgagtcttacgagatgggtgaagcacgtttccgcaagatgtttgagcgtcaacttaaagctggtgaggttgcggataacgctgccgccaagcctctcatcactaccctactccctaagatgattgcacgcatcaacgactggtttgaggaagtgaaagctaagcgcggcaagcgcccgacagccttccagttcctgcaagaaatcaagccggaagccgtagcgtacatcaccattaagaccactctggcttgcctaaccagtgcggaccgtacaaccgttcaggctgtagcaagcgcaatcggtcgggccattgaggacgaggctcgcttcggtcgtatccgtgaccttgaagctaagcacttcaagaaaaactatgaggaacaactcaacaagcgcgtagggcacgtctacaagaaagcatttatgcaagttgtcgaggctgacatgctctctaagggtctactcggtggcgaggcgtggtcttcgtggcataaggaagactctattcatgtaggagtacgctgcatcgagatgctcattgagtcaaccggaatggttagcttacaccgccaaaatgctggcgtagtaggtcaagactctgagactatcgaactcgcacctgaatacgctgaggctatcgcaacccgtgcaggtgcgctggctggcatctctccgatgttccaaccttgcgtagttcctcctaagccgtggactggcattactggtggtggctattgggctaacggtcgtcgtcctctggcgctggtgcgtactcacagtaagaaaggtctgatgcgctacgaagacgtttacatgcctgaggtgtacaaagcgattaacattgcgcaaaacaccgcctggtcgatcaacaagtgggtcctggcggtcgccaacgtaatcaccaagtggaagcattgtccggtccgggacatccctgcgattgagcgtgaagaactcccgatgaaaccggaagacatcgacatgaatcctgaggctctcaccgcgtggaaacgtgctaaagctgctgtgtaccgcagagacaaggctcgcaagtctcgccgtatcttgcttgagttcatgcttgagcaagccaataagtttgctaaccataaggccatctggttcccttacaacatggactggcgcggtcgtgtttacgctgtgccgatgttcaacccgcaaggtaacgatatgaccaaaggactgcttacgctggcgaaaggtaaaccaatcggtaaggaaggttactactggctgaaaatccacggtgcaaactgtgcgggtgtcgataaggttccgttccctgagcgcatcaagttcattgaggaaaaccacgagaacatcatggcttgcgctaagtctccactggagaacacttggtgggctgagcaagatagtccgttctgcttccttgcgttctgctttgagtacgctggggtacagcaccacggcctgagctataactgctcccttccgctggcgtttgacgggtcttgctctggcatccagcacttctccgcgatgctccgagatgaggtaggtggtcgcgcggttaacttgcttcctagtgaaaccgttcaggacatctacgggattgttgctaagaaagtcaacgagattctacaagcagacgcaatcaatgggaccgataacgaagtagttaccgtgaccgatgagaacactggtgaaatctctgagaaagtcaagctgggcactaaggcactggctggtcaatggctggcttacggtgttactcgcagtgtgactaagcgttcagtcatgacgctggcttacgggtccaaagagttcggcttccgtcaacaagtgctgcgccacactattcagtgggctattgattccggcaagggtctgatgttcactcagccgaatcaggctgctggatacatggctaagctgatttgggaatctgtgagcgtgacggtggtagctgcggttgaagcaatgaactggcttaagtctgctgctaagctgctggctgctgaggtcaaagataaggagactggagagattcttcgcaagcgttgcgctgtgcattgggtaactcctgatggtttccctgtgtggcaggaatacaagaagcctattcagacgcgcttgaacctgatgttcctcggtcagttccgcttacagcctaccattaacaccaacaaagatagcgagattgatgcacgtaaacaggagtctggtatcgctcctaactttgtacacagccaagacggtagccaccttcgtaagactgtagtgtgggcacacgagaagtacggaatcgaatcttttgcactgattcacgactccttcggtaccattccggctgacgctgcgaacctgttcaaagcagtgcgcgaaactatggttgacacatatgagtcttgtgatgtactggctgatttctacgaccagttcgctgaccagttgcacgagtctcaattggacaaaatgccagcacttccggctaaaggtaacttgaacctccgtgacatcttagagtcggacttcgcgttcgcg

SEQ ID NO: 330 - protein, 890 aa, synthetic construct
  REGION 1..890: note = Variant of RNA polymerase
MHHHHHHMNTINIAKNDFSDIELAAIPFNTLADHYGEGLAREQLALEHESYEMGEARFRKMFERQLKAGEVADNAAAKPLITTLLPKMIARINDWFEEVKAKRGKRPTAFQFLQEIKPEAVAYITIKTTLACLTSADRTTVQAVASAIGRAIEDEARFGRIRDLEAKHFKKNYEEQLNKRVGHVYKKAFMQVVEADMLSKGLLGGEAWSSWHKEDSIHVGVRCIEMLIESTGMVSLHRQNAGVVGQDSETIELAPEYAEAIATRAGALAGISPMFQPCVVPPKPWTGITGGGYWANGRRPLALVRTHSKKGLMRYEDVYMPEVYKAINIAQNTAWSINKWVLAVANVITKWKHCPVRDIPAIEREELPMKPEDIDMNPEALTAWKRAKAAVYRRDKARKSRRILLEFMLEQANKFANHKAIWFPYNMDWRGRVYAVPMFNPQGNDMTKGLLTLAKGKPIGKEGYYWLKIHGANCAGVDKVPFPERIKFIEENHENIMACAKSPLENTWWAEQDSPFCFLAFCFEYAGVQHHGLSYNCSLPLAFDGSCSGIQHFSAMLRDEVGGRAVNLLPSETVQDIYGIVAKKVNEILQADAINGTDNEVVTVTDENTGEISEKVKLGTKALAGQWLAYGVTRSVTKRSVMTLAYGSKEFGFRQQVLRHTIQWAIDSGKGLMFTQPNQAAGYMAKLIWESVSVTVVAAVEAMNWLKSAAKLLAAEVKDKETGEILRKRCAVHWVTPDGFPVWQEYKKPIQTRLNLMFLGQFRLQPTINTNKDSEIDARKQESGIAPNFVHSQDGSHLRKTVVWAHEKYGIESFALIHDSFGTIPADAANLFKAVRETMVDTYESCDVLADFYDQFADQLHESQLDKMPALPAKGNLNLRDILESDFAFA

SEQ ID NO: 331 - DNA, 2670 bp, synthetic construct
  misc_feature 1..2670: note = Variant of RNA polymerase
  source 1..2670: mol_type = other DNA
atgcaccatcaccatcaccatatgaacacgattaacatcgctaagaacgacttctctgacatcgaactggctgctatcccgttcaacactctggctgaccattacggtgagggcttagctcgcgaacagttggcccttgagcatgagtcttacgagatgggtgaagcacgtttccgcaagatgtttgagcgtcaacttaaagctggtgaggttgcggataacgctgccgccaagcctctcatcactaccctactccctaagatgattgcacgcatcaacgactggtttgaggaagtgaaagctaagcgcggcaagcgcccgacagccttccagttcctgcaagaaatcaagccggaagccgtagcgtacatcaccattaagaccactctggcttgcctaaccagtgcggaccgtacaaccgttcaggctgtagcaagcgcaatcggtcgggccattgaggacgaggctcgcttcggtcgtatccgtgaccttgaagctaagcacttcaagaaaaactatgaggaacaactcaacaagcgcgtagggcacgtctacaagaaagcatttatgcaagttgtcgaggctgacatgctctctaagggtctactcggtggcgaggcgtggtcttcgtggcataaggaagactctattcatgtaggagtacgctgcatcgagatgctcattgagtcaaccggaatggttagcttacaccgccaaaatgctggcgtagtaggtcaagactctgagactatcgaactcgcacctgaatacgctgaggctatcgcaacccgtgcaggtgcgctggctggcatctctccgatgttccaaccttgcgtagttcctcctaagccgtggactggcattactggtggtggctattgggctaacggtcgtcgtcctctggcgctggtgcgtactcacagtaagaaaggtctgatgcgctacgaagacgtttacatgcctgaggtgtacaaagcgattaacattgcgcaaaacaccgcctggtcgatcaacaagtgggtcctggcggtcgccaacgtaatcaccaagtggaagcattgtccggtccgggacatccctgcgattgagcgtgaagaactcccgatgaaaccggaagacatcgacatgaatcctgaggctctcaccgcgtggaaacgtgctaaagctgctgtgtaccgcagagacaaggctcgcaagtctcgccgtatcttgcttgagttcatgcttgagcaagccaataagtttgctaaccataaggccatctggttcccttacaacatggactggcgcggtcgtgtttacgctgtgccgatgttcaacccgcaaggtaacgatatgaccaaaggactgcttacgctggcgaaaggtaaaccaatcggtaaggaaggttactactggctgaaaatccacggtgcaaactgtgcgggtgtcgataaggttccgttccctgagcgcatcaagttcattgaggaaaaccacgagaacatcatggcttgcgctaagtctccactggagaacacttggtgggctgagcaagatagtccgttctgcttccttgcgttctgctttgagtacgctggggtacagcaccacggcctgagctataactgctcccttccgctggcgtttgacgggtcttgctctggcatccagcacttctccgcgatgctccgagatgaggtaggtggtcgcgcggttaacttgcttcctagtgaaaccgttcaggacatctacgggattgttgctaagaaagtcaacgagattctacaagcagacgcaatcaatgggaccgataacgaagtagttaccgtgaccgatgagaacactggtgaaatctctgagaaagtcaagctgggcactaaggcactggctggtcaatggctggcttacggtgttactcgcagtgtgactaagcgttcagtcatgacgctggcttacgggtccaaagagttcggcttccgtcaacaagtgctgcgccacactattcagtgggctattgattccggcaagggtctgatgttcactcagccgaatcaggctgctggatacatggctaagctgatttgggaatctgtgagcgtgacggtggtagctgcggttgaagcaatgaactggcttaagtctgctgctaagctgctggctgctgaggtctatgataagaagactggagagattcttcgcaagcgttgcgctgtgcattgggtaactcctgatggtttccctgtgtggcaggaatacaagaagcctattcagacgcgcttgaacctgatgttcctcggtcagttccgcttacagcctaccattaacaccaacaaagatagcgagattgatgcacgtaaacaggagtctggtatcgctcctaactttgtacacagccaagacggtagccaccttcgtaagactgtagtgtgggcacacgagaagtacggaatcgaatcttttgcactgattcacgactccttcggtaccattccggctgacgctgcgaacctgttcaaagcagtgcgcgaaactatggttgacacatatgagtcttgtgatgtactggctgatttctacgaccagttcgctgaccagttgcacgagtctcaattggacaaaatgccagcacttccggctaaaggtaacttgaacctccgtgacatcttagagtcggacttcgcgttcgcg

SEQ ID NO: 332 - protein, 890 aa, synthetic construct
  REGION 1..890: note = Variant of RNA polymerase
MHHHHHHMNTINIAKNDFSDIELAAIPFNTLADHYGEGLAREQLALEHESYEMGEARFRKMFERQLKAGEVADNAAAKPLITTLLPKMIARINDWFEEVKAKRGKRPTAFQFLQEIKPEAVAYITIKTTLACLTSADRTTVQAVASAIGRAIEDEARFGRIRDLEAKHFKKNYEEQLNKRVGHVYKKAFMQVVEADMLSKGLLGGEAWSSWHKEDSIHVGVRCIEMLIESTGMVSLHRQNAGVVGQDSETIELAPEYAEAIATRAGALAGISPMFQPCVVPPKPWTGITGGGYWANGRRPLALVRTHSKKGLMRYEDVYMPEVYKAINIAQNTAWSINKWVLAVANVITKWKHCPVRDIPAIEREELPMKPEDIDMNPEALTAWKRAKAAVYRRDKARKSRRILLEFMLEQANKFANHKAIWFPYNMDWRGRVYAVPMFNPQGNDMTKGLLTLAKGKPIGKEGYYWLKIHGANCAGVDKVPFPERIKFIEENHENIMACAKSPLENTWWAEQDSPFCFLAFCFEYAGVQHHGLSYNCSLPLAFDGSCSGIQHFSAMLRDEVGGRAVNLLPSETVQDIYGIVAKKVNEILQADAINGTDNEVVTVTDENTGEISEKVKLGTKALAGQWLAYGVTRSVTKRSVMTLAYGSKEFGFRQQVLRHTIQWAIDSGKGLMFTQPNQAAGYMAKLIWESVSVTVVAAVEAMNWLKSAAKLLAAEVYDKKTGEILRKRCAVHWVTPDGFPVWQEYKKPIQTRLNLMFLGQFRLQPTINTNKDSEIDARKQESGIAPNFVHSQDGSHLRKTVVWAHEKYGIESFALIHDSFGTIPADAANLFKAVRETMVDTYESCDVLADFYDQFADQLHESQLDKMPALPAKGNLNLRDILESDFAFA

SEQ ID NO: 333 - DNA, 2670 bp, synthetic construct
  misc_feature 1..2670: note = Variant of RNA polymerase
  source 1..2670: mol_type = other DNA
atgcaccatcaccatcaccatatgaacacgattaacatcgctaagaacgacttctctgacatcgaactggctgctatcccgttcaacactctggctgaccattacggtgagggcttagctcgcgaacagttggcccttgagcatgagtcttacgagatgggtgaagcacgtttccgcaagatgtttgagcgtcaacttaaagctggtgaggttgcggataacgctgccgccaagcctctcatcactaccctactccctaagatgattgcacgcatcaacgactggtttgaggaagtgaaagctaagcgcggcaagcgcccgacagccttccagttcctgcaagaaatcaagccggaagccgtagcgtacatcaccattaagaccactctggcttgcctaaccagtgcgggtaatacaaccgttcaggctgtagcaagcgcaatcggtcgggccattgaggacgaggctcgcttcggtcgtatccgtgaccttgaagctaagcacttcaagaaaaactatgaggaacaactcaacaagcgcgtagggcacgtctacaagaaagcatttatgcaagttgtcgaggctgacatgctctctaagggtctactcggtggcgaggcgtggtcttcgtggcataaggaagactctattcatgtaggagtacgctgcatcgagatgctcattgagtcaaccggaatggttagcttacaccgccaaaatgctggcgtagtaggtcaagactctgagactatcgaactcgcacctgaatacgctgaggctatcgcaacccgtgcaggtgcgctggctggcatctctccgatgttccaaccttgcgtagttcctcctaagccgtggactggcattactggtggtggctattgggctaacggtcgtcgtcctctggcgctggtgcgtactcacagtaagaaaggtctgatgcgctacgaagacgtttacatgcctgaggtgtacaaagcgattaacattgcgcaaaacaccgcctggtcgatcaacaagtgggtcctggcggtcgccaacgtaatcaccaagtggaagcattgtccggtccgggacatccctgcgattgagcgtgaagaactcccgatgaaaccggaagacatcgacatgaatcctgaggctctcaccgcgtggaaacgtgctaaagctgctgtgtaccgcagagacaaggctcgcaagtctcgccgtatcttgcttgagttcatgcttgagcaagccaataagtttgctaaccataaggccatctggttcccttacaacatggactggcgcggtcgtgtttacgctgtgccgatgttcaacccgcaaggtaacgatatgaccaaaggactgcttacgctggcgaaaggtaaaccaatcggtaaggaaggttactactggctgaaaatccacggtgcaaactgtgcgggtgtcgataaggttccgttccctgagcgcatcaagttcattgaggaaaaccacgagaacatcatggcttgcgctaagtctccactggagaacacttggtgggctgagcaagatagtccgttctgcttccttgcgttctgctttgagtacgctggggtacagcaccacggcctgagctataactgctcccttccgctggcgtttgacgggtcttgctctggcatccagcacttctccgcgatgctccgagatgaggtaggtggtcgcgcggttaacttgcttcctagtgaaaccgttcaggacatctacgggattgttgctaagaaagtcaacgagattctacaagcagacgcaatcaatgggaccgataacgaagtagttaccgtgaccgatgagaacactggtgaaatctctgagaaagtcaagctgggcactaaggcactggctggtcaatggctggcttacggtgttactcgcagtgtgactaagcgttcagtcatgacgctggcttacgggtccaaagagttcggcttccgtcaacaagtgctgcgccacactattcagtgggctattgattccggcaagggtctgatgttcactcagccgaatcaggctgctggatacatggctaagctgatttgggaatctgtgagcgtgacggtggtagctgcggttgaagcaatgaactggcttaagtctgctgctaagctgctggctgctgaggtcaaagataagaagactggagagattcttcgcaagcgttgcgctgtgcattgggtaactcctgatggtttccctgtgtggcaggaatacaagaagcctattcagacgcgcttgaacctgatgttcctcggtcagttccgcttacagcctaccattaacaccaacaaagatagcgagattgatgcacgtaaacaggagtctggtatcgctcctaactttgtacacagccaagacggtagccaccttcgtaagactgtagtgtgggcacacgagaagtacggaatcgaatcttttgcactgattcacgactccttcggtaccattccggctgacgctgcgaacctgttcaaagcagtgcgcgaaactatggttgacacatatgagtcttgtgatgtactggctgatttctacgaccagttcgctgaccagttgcacgagtctcaattggacaaaatgccagcacttccggctaaaggtaacttgaacctccgtgacatcttagagtcggacttcgcgttcgcg

SEQ ID NO: 334 - protein, 890 aa, synthetic construct
  REGION 1..890: note = Variant of RNA polymerase
MHHHHHHMNTINIAKNDFSDIELAAIPFNTLADHYGEGLAREQLALEHESYEMGEARFRKMFERQLKAGEVADNAAAKPLITTLLPKMIARINDWFEEVKAKRGKRPTAFQFLQEIKPEAVAYITIKTTLACLTSAGNTTVQAVASAIGRAIEDEARFGRIRDLEAKHFKKNYEEQLNKRVGHVYKKAFMQVVEADMLSKGLLGGEAWSSWHKEDSIHVGVRCIEMLIESTGMVSLHRQNAGVVGQDSETIELAPEYAEAIATRAGALAGISPMFQPCVVPPKPWTGITGGGYWANGRRPLALVRTHSKKGLMRYEDVYMPEVYKAINIAQNTAWSINKWVLAVANVITKWKHCPVRDIPAIEREELPMKPEDIDMNPEALTAWKRAKAAVYRRDKARKSRRILLEFMLEQANKFANHKAIWFPYNMDWRGRVYAVPMFNPQGNDMTKGLLTLAKGKPIGKEGYYWLKIHGANCAGVDKVPFPERIKFIEENHENIMACAKSPLENTWWAEQDSPFCFLAFCFEYAGVQHHGLSYNCSLPLAFDGSCSGIQHFSAMLRDEVGGRAVNLLPSETVQDIYGIVAKKVNEILQADAINGTDNEVVTVTDENTGEISEKVKLGTKALAGQWLAYGVTRSVTKRSVMTLAYGSKEFGFRQQVLRHTIQWAIDSGKGLMFTQPNQAAGYMAKLIWESVSVTVVAAVEAMNWLKSAAKLLAAEVKDKKTGEILRKRCAVHWVTPDGFPVWQEYKKPIQTRLNLMFLGQFRLQPTINTNKDSEIDARKQESGIAPNFVHSQDGSHLRKTVVWAHEKYGIESFALIHDSFGTIPADAANLFKAVRETMVDTYESCDVLADFYDQFADQLHESQLDKMPALPAKGNLNLRDILESDFAFA

SEQ ID NO: 335 - DNA, 2670 bp, synthetic construct
  misc_feature 1..2670: note = Variant of RNA polymerase
  source 1..2670: mol_type = other DNA
atgcaccatcaccatcaccatatgaacacgattaacatcgctaagaacgacttctctgacatcgaactggctgctatcccgttcaacactctggctgaccattacggtgagggcttagctcgcgaacagttggcccttgagcatgagtcttacgagatgggtgaagcacgtttccgcaagatgtttgagcgtcaacttaaagctggtgaggttgcggataacgctgccgccaagcctctcatcactaccctactccctaagatgattgcacgcatcaacgactggtttgaggaagtgaaagctaagcgcggcaagcgcccgacagccttccagttcctgcaagaaatcaagccggaagccgtagcgtacatcaccattaagaccactctggcttgcctaaccagtgcggaccgtacaaccgttcaggctgtagcaagcgcaatcggtcgggccattgaggacgaggctcgcttcggtcgtatccgtgaccttgaagctaagcacttcaagaaaaactatgaggaacaactcaacaagcgcgtagggcacgtctacaagggggcatttatgcaagttgtcgaggctgacatgctctctaagggtctactcggtggcgaggcgtggtcttcgtggcataaggaagactctattcatgtaggagtacgctgcatcgagatgctcattgagtcaaccggaatggttagcttacaccgccaaaatgctggcgtagtaggtcaagactctgagactatcgaactcgcacctgaatacgctgaggctatcgcaacccgtgcaggtgcgctggctggcatctctccgatgttccaaccttgcgtagttcctcctaagccgtggactggcattactggtggtggctattgggctaacggtcgtcgtcctctggcgctggtgcgtactcacagtaagaaaggtctgatgcgctacgaagacgtttacatgcctgaggtgtacaaagcgattaacattgcgcaaaacaccgcctggtcgatcaacaagtgggtcctggcggtcgccaacgtaatcaccaagtggaagcattgtccggtccgggacatccctgcgattgagcgtgaagaactcccgatgaaaccggaagacatcgacatgaatcctgaggctctcaccgcgtggaaacgtgctaaagctgctgtgtaccgcagagacaaggctcgcaagtctcgccgtatcttgcttgagttcatgcttgagcaagccaataagtttgctaaccataaggccatctggttcccttacaacatggactggcgcggtcgtgtttacgctgtgccgatgttcaacccgcaaggtaacgatatgaccaaaggactgcttacgctggcgaaaggtaaaccaatcggtaaggaaggttactactggctgaaaatccacggtgcaaactgtgcgggtgtcgataaggttccgttccctgagcgcatcaagttcattgaggaaaaccacgagaacatcatggcttgcgctaagtctccactggagaacacttggtgggctgagcaagatagtccgttctgcttccttgcgttctgctttgagtacgctggggtacagcaccacggcctgagctataactgctcccttccgctggcgtttgacgggtcttgctctggcatccagcacttctccgcgatgctccgagatgaggtaggtggtcgcgcggttaacttgcttcctagtgaaaccgttcaggacatctacgggattgttgctaagaaagtcaacgagattctacaagcagacgcaatcaatgggaccgataacgaagtagttaccgtgaccgatgagaacactggtgaaatctctgagaaagtcaagctgggcactaaggcactggctggtcaatggctggcttacggtgttactcgcagtgtgactaagcgttcagtcatgacgctggcttacgggtccaaagagttcggcttccgtcaacaagtgctgcgccacactattcagtgggctattgattccggcaagggtctgatgttcactcagccgaatcaggctgctggatacatggctaagctgatttgggaatctgtgagcgtgacggtggtagctgcggttgaagcaatgaactggcttaagtctgctgctaagctgctggctgctgaggtcaaagataagaagactggagagattcttcgcaagcgttgcgctgtgcattgggtaactcctgatggtttccctgtgtggcaggaatacaagaagcctattcagacgcgcttgaacctgatgttcctcggtcagttccgcttacagcctaccattaacaccaacaaagatagcgagattgatgcacgtaaacaggagtctggtatcgctcctaactttgtacacagccaagacggtagccaccttcgtaagactgtagtgtgggcacacgagaagtacggaatcgaatcttttgcactgattcacgactccttcggtaccattccggctgacgctgcgaacctgttcaaagcagtgcgcgaaactatggttgacacatatgagtcttgtgatgtactggctgatttctacgaccagttcgctgaccagttgcacgagtctcaattggacaaaatgccagcacttccggctaaaggtaacttgaacctccgtgacatcttagagtcggacttcgcgttcgcg

SEQ ID NO: 336 - protein, 890 aa, synthetic construct
  REGION 1..890: note = Variant of RNA polymerase
MHHHHHHMNTINIAKNDFSDIELAAIPFNTLADHYGEGLAREQLALEHESYEMGEARFRKMFERQLKAGEVADNAAAKPLITTLLPKMIARINDWFEEVKAKRGKRPTAFQFLQEIKPEAVAYITIKTTLACLTSADRTTVQAVASAIGRAIEDEARFGRIRDLEAKHFKKNYEEQLNKRVGHVYKGAFMQVVEADMLSKGLLGGEAWSSWHKEDSIHVGVRCIEMLIESTGMVSLHRQNAGVVGQDSETIELAPEYAEAIATRAGALAGISPMFQPCVVPPKPWTGITGGGYWANGRRPLALVRTHSKKGLMRYEDVYMPEVYKAINIAQNTAWSINKWVLAVANVITKWKHCPVRDIPAIEREELPMKPEDIDMNPEALTAWKRAKAAVYRRDKARKSRRILLEFMLEQANKFANHKAIWFPYNMDWRGRVYAVPMFNPQGNDMTKGLLTLAKGKPIGKEGYYWLKIHGANCAGVDKVPFPERIKFIEENHENIMACAKSPLENTWWAEQDSPFCFLAFCFEYAGVQHHGLSYNCSLPLAFDGSCSGIQHFSAMLRDEVGGRAVNLLPSETVQDIYGIVAKKVNEILQADAINGTDNEVVTVTDENTGEISEKVKLGTKALAGQWLAYGVTRSVTKRSVMTLAYGSKEFGFRQQVLRHTIQWAIDSGKGLMFTQPNQAAGYMAKLIWESVSVTVVAAVEAMNWLKSAAKLLAAEVKDKKTGEILRKRCAVHWVTPDGFPVWQEYKKPIQTRLNLMFLGQFRLQPTINTNKDSEIDARKQESGIAPNFVHSQDGSHLRKTVVWAHEKYGIESFALIHDSFGTIPADAANLFKAVRETMVDTYESCDVLADFYDQFADQLHESQLDKMPALPAKGNLNLRDILESDFAFA

SEQ ID NO: 337 - DNA, 2670 bp, synthetic construct
  misc_feature 1..2670: note = Variant of RNA polymerase
  source 1..2670: mol_type = other DNA
atgcaccatcaccatcaccatatgaacacgattaacatcgctaagaacgacttctctgacatcgaactggctgctatcccgttcaacactctggctgaccattacggtgagggcttagctcgcgaacagttggcccttgagcatgagtcttacgagatgggtgaagcacgtttccgcaagatgtttgagcgtcaacttaaagctggtgaggttgcggataacgctgccgccaagcctctcatcactaccctactccctaagatgattgcacgcatcaacgactggtttgaggaagtgaaagctaagcgcggcaagcgcccgacagccttccagttcctgcaagaaatcaagccggaagccgtagcgtacatcaccattaagaccactctggcttgcctaaccagtgcggaccgtacaaccgttcaggctgtagcaagcgcaatcggtcgggccattgaggacgaggctcgcttcggtcgtatccgtgaccttgaagctaagcacttcaagaaaaactatgaggaacaactcaacaagcgcgtagggcacgtctacaagaaagcatttatgcaagttgtcgaggctgacatgctctctaagggtctactcggtggcgaggcgtggtcttcgtggcataaggaagactctattcatgtaggagtacgctgcatcgagatgctcattgagtcaaccggaatggttagcttacaccgccaaaatgctggcgtagtaggtcaagactctgagactatcgaactcgcacctgaatacgctgaggctatcgcaacccgtgcaggtgcgctggctggcatctctccgatgttccaaccttgcgtagttcctcctaagccgtggactggcattactggtggtggctattgggctaacggtcgtcgtcctctggcgctggtgcgtactcacagtaagaaaggtctgatgcgctacgaagacgtttacatgcctgaggtgtacaaagcgattaacattgcgcaaaacaccgcctggtcgatcaacaagtgggtcctggcggtcgccaacgtaatcaccaagtggaagcattgtccggtccgggacatccctgcgattgagcgtgaagaactcccgatgaaaccggaagacatcgacatgaatcctgaggctctcaccgcgtggaaacgtgctaaagctgctgtgtaccgcagagacaaggctcgcaagtctcgccgtatcttgcttgagttcatgcttgagcaagccaataagtttgctaaccataaggccatctggttcccttacaacatggactggcgcggtcgtgtttacgctgtgccgatgttcaacccgcaaggtaacgatatgaccaaaggactgcttacgctggcgaaaggtaaaccaatcggtaaggaaggttactactggctgaaaatccacggtgcaaactgtgcgggtgtcgataaggttccgttccctgagcgcatcaagttcattgaggaaaaccacgagaacatcatggcttgcgctaagtctccactggagaacacttggtgggctgagcaagatagtccgttctgcttccttgcgttctgctttgagtacgctggggtacagcaccacggcctgagctataactgctcccttccgctggcgtttgacgggtcttgctctggcatccagcacttctccgcgatgctccgagatgaggtaggtggtcgcgcggttaacttgcttcctagtgaaaccgttcaggacatctacgggattgttgctaagaaagtcaacgagattctacaagcagacgcaatcaatgggaccgataacgaagtagttaccgtgaccgatgagaacactggtgaaatctctgagaaagtcaagctgggcactaaggcactggctggtcaatggctggcttacggtgttactcgcagtgtgactaagcgttcagtcatgacgctggcttacgggtccaaagagttcggcttccgtcaacaagtgctgcgccacactattcagtgggctattgattccggcaagggtctgatgttcactcagccgaatcaggctgctggatacatggctaagctgatttgggaatctgtgagcgtgacggtggtagctgcggttgaagcaatgaactggcttaagtctgctgctaagctgctggctgctgaggtcaaagatgggaagactggagagattcttcgcaagcgttgcgctgtgcattgggtaactcctgatggtttccctgtgtggcaggaatacaagaagcctattcagacgcgcttgaacctgatgttcctcggtcagttccgcttacagcctaccattaacaccaacaaagatagcgagattgatgcacgtaaacaggagtctggtatcgctcctaactttgtacacagccaagacggtagccaccttcgtaagactgtagtgtgggcacacgagaagtacggaatcgaatcttttgcactgattcacgactccttcggtaccattccggctgacgctgcgaacctgttcaaagcagtgcgcgaaactatggttgacacatatgagtcttgtgatgtactggctgatttctacgaccagttcgctgaccagttgcacgagtctcaattggacaaaatgccagcacttccggctaaaggtaacttgaacctccgtgacatcttagagtcggacttcgcgttcgcg

SEQ ID NO: 338 - protein, 890 aa, synthetic construct
  REGION 1..890: note = Variant of RNA polymerase
MHHHHHHMNTINIAKNDFSDIELAAIPFNTLADHYGEGLAREQLALEHESYEMGEARFRKMFERQLKAGEVADNAAAKPLITTLLPKMIARINDWFEEVKAKRGKRPTAFQFLQEIKPEAVAYITIKTTLACLTSADRTTVQAVASAIGRAIEDEARFGRIRDLEAKHFKKNYEEQLNKRVGHVYKKAFMQVVEADMLSKGLLGGEAWSSWHKEDSIHVGVRCIEMLIESTGMVSLHRQNAGVVGQDSETIELAPEYAEAIATRAGALAGISPMFQPCVVPPKPWTGITGGGYWANGRRPLALVRTHSKKGLMRYEDVYMPEVYKAINIAQNTAWSINKWVLAVANVITKWKHCPVRDIPAIEREELPMKPEDIDMNPEALTAWKRAKAAVYRRDKARKSRRILLEFMLEQANKFANHKAIWFPYNMDWRGRVYAVPMFNPQGNDMTKGLLTLAKGKPIGKEGYYWLKIHGANCAGVDKVPFPERIKFIEENHENIMACAKSPLENTWWAEQDSPFCFLAFCFEYAGVQHHGLSYNCSLPLAFDGSCSGIQHFSAMLRDEVGGRAVNLLPSETVQDIYGIVAKKVNEILQADAINGTDNEVVTVTDENTGEISEKVKLGTKALAGQWLAYGVTRSVTKRSVMTLAYGSKEFGFRQQVLRHTIQWAIDSGKGLMFTQPNQAAGYMAKLIWESVSVTVVAAVEAMNWLKSAAKLLAAEVKDGKTGEILRKRCAVHWVTPDGFPVWQEYKKPIQTRLNLMFLGQFRLQPTINTNKDSEIDARKQESGIAPNFVHSQDGSHLRKTVVWAHEKYGIESFALIHDSFGTIPADAANLFKAVRETMVDTYESCDVLADFYDQFADQLHESQLDKMPALPAKGNLNLRDILESDFAFA

SEQ ID NO: 339 - DNA, 2670 bp, synthetic construct
  misc_feature 1..2670: note = Variant of RNA polymerase
  source 1..2670: mol_type = other DNA
atgcaccatcaccatcaccatatgaacacgattaacatcgctaagaacgacttctctgacatcgaactggctgctatcccgttcaacactctggctgaccattacggtgagggcttagctcgcgaacagttggcccttgagcatgagtcttacgagatgggtgaagcacgtttccgcaagatgtttgagcgtcaacttaaagctggtgaggttgcggataacgctgccgccaagcctctcatcactaccctactccctaagatgattgcacgcatcaacgactggtttgaggaagtgaaagctaagcgcggcaagcgcccgacagccttccagttcctgcaagaaatcaagccggaagccgtagcgtacatcaccattaagaccactctggcttgcctaaccagtgcggaccgtacaaccgttcaggctgtagcaagcgcaatcggtcgggccattgaggacgaggctcgcttcggtcgtatccgtgaccttgaagctaagcacttcaagaaaaactatgaggaacaactcaacaagcgcgtagggcacgtctacaagaaagcatttatgcaagttgtcgaggctgacatgctctctaagggtctactcggtggcgaggcgtggtcttcgtggcataaggaagactctattcatgtaggagtacgctgcatcgagatgctcattgagtcaaccggaatggttagcttacaccgccaaaatgctggcgtagtaggtcaagactctgagactatcgaactcgcacctgaatacgctgaggctatcgcaacccgtgcaggtgcgctggctggcatctctccgatgttccaaccttgcgtagttcctcctaagccgtggactggcattactggtggtggctattgggctaacggtcgtcgtcctctggcgctggtgcgtactcacagtaagaaaggtctgatgcgctacgaagacgtttacatgcctgaggtgtacaaagcgattaacattgcgcaaaacaccgcctggtcgatcaacaagtgggtcctggcggtcgccaacgtaatcaccaagtggaagcattgtccggtccgggacatccctgcgattgagcgtgaagaactcccgatgaaaccggaagacatcgacatgaatcctgaggctctcaccgcgtggaaacgtgctaaagctgctgtgtaccgcagagacaaggctcgcaagtctcgccgtatcttgcttgagttcatgcttgagcaagccaataagtttgctaaccataaggccatctggttcccttacaacatggactggcgcggtcgtgtttacgctgtgccgatgttcaacccgcaaggtaacgatatgaccaaaggactgcttacgctggcgaaaggtaaaccaatcggtaaggaaggttactactggctgaaaatccacggtgcaaactgtgcgggtgtcgataaggttccgttccctgagcgcatcaagttcattgaggaaaaccacgagaacatcatggcttgcgctaagtctccactggagaacacttggtgggctgagcaagatagtccgttctgcttccttgcgttctgctttgagtacgctggggtacagcaccacggcctgagctataactgctcccttccgctggcgtttgacgggtcttgctctggcatccagcacttctccgcgatgctccgagatgaggtaggtggtcgcgcggttaacttgcttcctagtgaaaccgttcaggacatctacgggattgttgctaagaaagtcaacgagattctacaagcagacgcaatcaatgggaccgataacgaagtagttaccgtgaccgatgagaacactggtgaaatctctgagaaagtcaagctgggcactaaggcactggctggtcaatggctggcttacggtgttactcgcagtgtgactaagcgttcagtcatgacgctggcttacgggtccaaagagttcggcttccgtcaacaagtgctgcgccacactattcagtgggctattgattccggcaagggtctgatgttcactcagccgaatcaggctgctggatacatggctaagctgatttgggaatctgtgagcgtgacggtggtagctgcggttgaagcaatgaactggcttaagtctgctgctaagctgctggctgctgaggtcaaagatcctaagactggagagattcttcgcaagcgttgcgctgtgcattgggtaactcctgatggtttccctgtgtggcaggaatacaagaagcctattcagacgcgcttgaacctgatgttcctcggtcagttccgcttacagcctaccattaacaccaacaaagatagcgagattgatgcacgtaaacaggagtctggtatcgctcctaactttgtacacagccaagacggtagccaccttcgtaagactgtagtgtgggcacacgagaagtacggaatcgaatcttttgcactgattcacgactccttcggtaccattccggctgacgctgcgaacctgttcaaagcagtgcgcgaaactatggttgacacatatgagtcttgtgatgtactggctgatttctacgaccagttcgctgaccagttgcacgagtctcaattggacaaaatgccagcacttccggctaaaggtaacttgaacctccgtgacatcttagagtcggacttcgcgttcgcg

SEQ ID NO: 340 - protein, 890 aa, synthetic construct
  REGION 1..890: note = Variant of RNA polymerase
MHHHHHHMNTINIAKNDFSDIELAAIPFNTLADHYGEGLAREQLALEHESYEMGEARFRKMFERQLKAGEVADNAAAKPLITTLLPKMIARINDWFEEVKAKRGKRPTAFQFLQEIKPEAVAYITIKTTLACLTSADRTTVQAVASAIGRAIEDEARFGRIRDLEAKHFKKNYEEQLNKRVGHVYKKAFMQVVEADMLSKGLLGGEAWSSWHKEDSIHVGVRCIEMLIESTGMVSLHRQNAGVVGQDSETIELAPEYAEAIATRAGALAGISPMFQPCVVPPKPWTGITGGGYWANGRRPLALVRTHSKKGLMRYEDVYMPEVYKAINIAQNTAWSINKWVLAVANVITKWKHCPVRDIPAIEREELPMKPEDIDMNPEALTAWKRAKAAVYRRDKARKSRRILLEFMLEQANKFANHKAIWFPYNMDWRGRVYAVPMFNPQGNDMTKGLLTLAKGKPIGKEGYYWLKIHGANCAGVDKVPFPERIKFIEENHENIMACAKSPLENTWWAEQDSPFCFLAFCFEYAGVQHHGLSYNCSLPLAFDGSCSGIQHFSAMLRDEVGGRAVNLLPSETVQDIYGIVAKKVNEILQADAINGTDNEVVTVTDENTGEISEKVKLGTKALAGQWLAYGVTRSVTKRSVMTLAYGSKEFGFRQQVLRHTIQWAIDSGKGLMFTQPNQAAGYMAKLIWESVSVTVVAAVEAMNWLKSAAKLLAAEVKDPKTGEILRKRCAVHWVTPDGFPVWQEYKKPIQTRLNLMFLGQFRLQPTINTNKDSEIDARKQESGIAPNFVHSQDGSHLRKTVVWAHEKYGIESFALIHDSFGTIPADAANLFKAVRETMVDTYESCDVLADFYDQFADQLHESQLDKMPALPAKGNLNLRDILESDFAFA

SEQ ID NO: 341 - DNA, 2670 bp, synthetic construct
  misc_feature 1..2670: note = Variant of RNA polymerase
  source 1..2670: mol_type = other DNA
atgcaccatcaccatcaccatatgaacacgattaacatcgctaagaacgacttctctgacatcgaactggctgctatcccgttcaacactctggctgaccattacggtgagggcttagctcgcgaacagttggcccttgagcatgagtcttacgagatgggtgaagcacgtttccgcaagatgtttgagcgtcaacttaaagctggtgaggttgcggataacgctgccgccaagcctctcatcactaccctactccctaagatgattgcacgcatcaacgactggtttgaggaagtgaaagctaagcgcggcaagcgcccgacagccttccagttcctgcaagaaatcaagccggaagccgtagcgtacatcaccattaagaccactctggcttgcctaaccagtgcggaccgtacaaccgttcaggctgtagcaagcgcaatcggtcgggccattgaggacgaggctcgcttcggtcgtatccgtgaccttgaagctaagcacttcaagaaaaactatgaggaacaactcaacaagcgcgtagggcacgtctacaagaaagcatttatgcaagttgtcgaggctgacatgctctctaagggtctactcggtggcgaggcgtggtcttcgtggcataaggaagactctattcatgtaggagtacgctgcatcgagatgctcattgagtcaaccggaatggttagcttacaccgccaaaatgctggcgtagtaggtcaagactctgagactatcgaactcgcacctgaatacgctgaggctatcgcaacccgtgcaggtgcgctggctggcatctctccgatgttccaaccttgcgtagttcctcctaagccgtggactggcattactggtggtggctattgggctaacggtcgtcgtcctctggcgctggtgcgtactcacagtaagaaaggtctgatgcgctacgaagacgtttacatgcctgaggtgtacaaagcgattaacattgcgcaaaacaccgcctggtcgatcaacaagtgggtcctggcggtcgccaacgtaatcaccaagtggaagcattgtccggtccgggacatccctgcgattgagcgtgaagaactcccgatgaaaccggaagacatcgacatgaatcctgaggctctcaccgcgtggaaacgtgctaaagctgctgtgtaccgcagagacaaggctcgcaagtctcgccgtatcttgcttgagttcatgcttgagcaagccaataagtttgctaaccataaggccatctggttcccttacaacatggactggcgcggtcgtgtttacgctgtgccgatgttcaacccgcaaggtaacgatatgaccaaaggactgcttacgctggcgaaaggtaaaccaatcggtaaggaaggttactactggctgaaaatccacggtgcaaactgtgcgggtgtcgataaggttccgttccctgagcgcatcaagttcattgaggaaaaccacgagaacatcatggcttgcgctaagtctccactggagaacacttggtgggctgagcaagatagtccgttctgcttccttgcgttctgctttgagtacgctggggtacagcaccacggcctgagctataactgctcccttccgctggcgtttgacgggtcttgctctggcatccagcacttctccgcgatgctccgagatgaggtaggtggtcgcgcggttaacttgcttcctagtgaaaccgttcaggacatctacgggattgttgctaagaaagtcaacgagattctacaagcagacgcaatcaatgggaccgataacgaagtagttaccgtgaccgatgagaacactggtgaaatctctgagaaagtcaagctgggcactaaggcactggctggtcaatggctggcttacggtgttactcgcagtgtgactaagcgttcagtcatgacgctggcttacgggtccaaagagttcggcttccgtcaacaagtgctgcgccacactattcagtgggctattgattccggcaagggtctgatgttcactcagccgaatcaggctgctggatacatggctaagctgatttgggaatctgtgagcgtgacggtggtagctgcggttgaagcaatgaactggcttaagtctgctgctaagctgctggctgctgaggtcaaagataagaagactggagagattcttcgcaagcgttgcgctgtgcattgggtaactcctgatggtttccctgtgtggcaggaatacaagaagcctattcagacgcgcttgaacctgatgttcctcggtcagttccgcttacagcctaccattaacaccaacaaagatagcgagattgatgcacgtaaacaggagtctggtatcgctcctaactttgtacacagccaagacggtagccaccttcgtaagactgtagtgtgggcacacgagaagtacggaatcgaatcttttgcactgattcacgactccttcggtaccattccggctgacgctgcgaacctgttcaaagcagtgcgcgaaactatggttgacacatatgagtcttgtgatgtactggctgatttctacactcagttcgctgaccagttgcacgagtctcaattggacaaaatgccagcacttccggctaaaggtaacttgaacctccgtgacatcttagagtcggacttcgcgttcgcg

SEQ ID NO: 342 - protein, 890 aa, synthetic construct
  REGION 1..890: note = Variant of RNA polymerase
MHHHHHHMNTINIAKNDFSDIELAAIPFNTLADHYGEGLAREQLALEHESYEMGEARFRKMFERQLKAGEVADNAAAKPLITTLLPKMIARINDWFEEVKAKRGKRPTAFQFLQEIKPEAVAYITIKTTLACLTSADRTTVQAVASAIGRAIEDEARFGRIRDLEAKHFKKNYEEQLNKRVGHVYKKAFMQVVEADMLSKGLLGGEAWSSWHKEDSIHVGVRCIEMLIESTGMVSLHRQNAGVVGQDSETIELAPEYAEAIATRAGALAGISPMFQPCVVPPKPWTGITGGGYWANGRRPLALVRTHSKKGLMRYEDVYMPEVYKAINIAQNTAWSINKWVLAVANVITKWKHCPVRDIPAIEREELPMKPEDIDMNPEALTAWKRAKAAVYRRDKARKSRRILLEFMLEQANKFANHKAIWFPYNMDWRGRVYAVPMFNPQGNDMTKGLLTLAKGKPIGKEGYYWLKIHGANCAGVDKVPFPERIKFIEENHENIMACAKSPLENTWWAEQDSPFCFLAFCFEYAGVQHHGLSYNCSLPLAFDGSCSGIQHFSAMLRDEVGGRAVNLLPSETVQDIYGIVAKKVNEILQADAINGTDNEVVTVTDENTGEISEKVKLGTKALAGQWLAYGVTRSVTKRSVMTLAYGSKEFGFRQQVLRHTIQWAIDSGKGLMFTQPNQAAGYMAKLIWESVSVTVVAAVEAMNWLKSAAKLLAAEVKDKKTGEILRKRCAVHWVTPDGFPVWQEYKKPIQTRLNLMFLGQFRLQPTINTNKDSEIDARKQESGIAPNFVHSQDGSHLRKTVVWAHEKYGIESFALIHDSFGTIPADAANLFKAVRETMVDTYESCDVLADFYTQFADQLHESQLDKMPALPAKGNLNLRDILESDFAFA

SEQ ID NO: 343 - DNA, 2670 bp, synthetic construct
  misc_feature 1..2670: note = Variant of RNA polymerase
  source 1..2670: mol_type = other DNA
atgcaccatcaccatcaccatatgaacacgattaacatcgctaagaacgacttctctgacatcgaactggctgctatcccgttcaacactctggctgaccattacggtgagggcttagctcgcgaacagttggcccttgagcatgagtcttacgagatgggtgaagcacgtttccgcaagatgtttgagcgtcaacttaaagctggtgaggttgcggataacgctgccgccaagcctctcatcactaccctactccctaagatgattgcacgcatcaacgactggtttgaggaagtgaaagctaagcgcggcaagcgcccgacagccttccagttcctgcaagaaatcaagccggaagccgtagcgtacatcaccattaagaccactctggcttgcctaaccagtgcggaccgtacaaccgttcaggctgtagcaagcgcaatcggtcgggccattgaggacgaggctcgcttcggtcgtatccgtgaccttgaagctaagcacttcaagaaaaactatgaggaacaactcaacaagcgcgtagggcacgtctacaagaaagcatttatgcaagttgtcgaggctgacatgctctctaagggtctactcggtggcgaggcgtggtcttcgtggcataaggaagactctattcatgtaggagtacgctgcatcgagatgctcattgagtcaaccggaatggttagcttacaccgccaaaatgctggcgtagtaggtcaagactctgagactatcgaactcgcacctgaatacgctgaggctatcgcaacccgtgcaggtgcgctggctggcatctctccgatgttccaaccttgcgtagttcctcctaagccgtggactggcattactggtggtggctattgggctaacggtcgtcgtcctctggcgctggtgcgtactcacagtaagaaaggtctgatgcgctacgaagacgtttacatgcctgaggtgtacaaagcgattaacattgcgcaaaacaccgcctggtcgatcaacaagtgggtcctggcggtcgccaacgtaatcaccaagtggaagcattgtccggtccgggacatccctgcgattgagcgtgaagaactcccgatgaaaccggaagacatcgacatgaatcctgaggctctcaccgcgtggaaacgtgctaaagctgctgtgtaccgcagagacaaggctcgcaagtctcgccgtatcttgcttgagttcatgcttgagcaagccaataagtttgctaaccataaggccatctggttcccttacaacatggactggcgcggtcgtgtttacgctgtgccgatgttcaacccgcaaggtaacgatatgaccaaaggactgcttacgctggcgaaaggtaaaccaatcggtaaggaaggttactactggctgaaaatccacggtgcaaactgtgcgggtgtcgataaggttccgttccctgagcgcatcaagttcattgaggaaaaccacgagaacatcatggcttgcgctaagtctccactggagaacacttggtgggctgagcaagatagtccgttctgcttccttgcgttctgctttgagtacgctggggtacagcaccacggcctgagctataactgctcccttccgctggcgtttgacgggtcttgctctggcatccagcacttctccgcgatgctccgagatgaggtaggtggtcgcgcggttaacttgcttcctagtgaaaccgttcaggacatctacgggattgttgctaagaaagtcaacgagattctacaagcagacgcaatcaatgggaccgataacgaagtagttaccgtgaccgatgagaacactggtgaaatctctgagaaagtcaagctgggcactaaggcactggctggtcaatggctggcttacggtgttactcgcagtgtgactaagcgttcagtcatgacgctggcttacgggtccaaagagttcggcttccgtcaacaagtgctgcgccacactattcagtgggctattgattccggcaagggtctgatgttcactcagccgaatcaggctgctggatacatggctaagctgatttgggaatctgtgagcgtgacggtggtagctgcggttgaagcaatgaactggcttaagtctgctgctaagctgctggctgctgaggtcaaagatattaagactggagagattcttcgcaagcgttgcgctgtgcattgggtaactcctgatggtttccctgtgtggcaggaatacaagaagcctattcagacgcgcttgaacctgatgttcctcggtcagttccgcttacagcctaccattaacaccaacaaagatagcgagattgatgcacgtaaacaggagtctggtatcgctcctaactttgtacacagccaagacggtagccaccttcgtaagactgtagtgtgggcacacgagaagtacggaatcgaatcttttgcactgattcacgactccttcggtaccattccggctgacgctgcgaacctgttcaaagcagtgcgcgaaactatggttgacacatatgagtcttgtgatgtactggctgatttctacgaccagttcgctgaccagttgcacgagtctcaattggacaaaatgccagcacttccggctaaaggtaacttgaacctccgtgacatcttagagtcggacttcgcgttcgcg

SEQ ID NO: 344 - protein, 890 aa, synthetic construct
  REGION 1..890: note = Variant of RNA polymerase
MHHHHHHMNTINIAKNDFSDIELAAIPFNTLADHYGEGLAREQLALEHESYEMGEARFRKMFERQLKAGEVADNAAAKPLITTLLPKMIARINDWFEEVKAKRGKRPTAFQFLQEIKPEAVAYITIKTTLACLTSADRTTVQAVASAIGRAIEDEARFGRIRDLEAKHFKKNYEEQLNKRVGHVYKKAFMQVVEADMLSKGLLGGEAWSSWHKEDSIHVGVRCIEMLIESTGMVSLHRQNAGVVGQDSETIELAPEYAEAIATRAGALAGISPMFQPCVVPPKPWTGITGGGYWANGRRPLALVRTHSKKGLMRYEDVYMPEVYKAINIAQNTAWSINKWVLAVANVITKWKHCPVRDIPAIEREELPMKPEDIDMNPEALTAWKRAKAAVYRRDKARKSRRILLEFMLEQANKFANHKAIWFPYNMDWRGRVYAVPMFNPQGNDMTKGLLTLAKGKPIGKEGYYWLKIHGANCAGVDKVPFPERIKFIEENHENIMACAKSPLENTWWAEQDSPFCFLAFCFEYAGVQHHGLSYNCSLPLAFDGSCSGIQHFSAMLRDEVGGRAVNLLPSETVQDIYGIVAKKVNEILQADAINGTDNEVVTVTDENTGEISEKVKLGTKALAGQWLAYGVTRSVTKRSVMTLAYGSKEFGFRQQVLRHTIQWAIDSGKGLMFTQPNQAAGYMAKLIWESVSVTVVAAVEAMNWLKSAAKLLAAEVKDIKTGEILRKRCAVHWVTPDGFPVWQEYKKPIQTRLNLMFLGQFRLQPTINTNKDSEIDARKQESGIAPNFVHSQDGSHLRKTVVWAHEKYGIESFALIHDSFGTIPADAANLFKAVRETMVDTYESCDVLADFYDQFADQLHESQLDKMPALPAKGNLNLRDILESDFAFA

SEQ ID NO: 345 - DNA, 2670 bp, synthetic construct
  misc_feature 1..2670: note = Variant of RNA polymerase
  source 1..2670: mol_type = other DNA
atgcaccatcaccatcaccatatgaacacgattaacatcgctaagaacgacttctctgacatcgaactggctgctatcccgttcaacactctggctgaccattacggtgagggcttagctcgcgaacagttggcccttgagcatgagtcttacgagatgggtgaagcacgtttccgcaagatgtttgagcgtcaacttaaagctggtgaggttgcggataacgctgccgccaagcctctcatcactaccctactccctaagatgattgcacgcatcaacgactggtttgaggaagtgaaagctaagcgcggcaagcgcccgacagccttccagttcctgcaagaaatcaagccggaagccgtagcgtacatcaccattaagaccactctggcttgcctaaccagtgcggaccgtacaaccgttcaggctgtagcaagcgcaatcggtcgggccattgaggacgaggctcgcttcggtcttatccgtgaccttgaagctaagcacttcaagaaaaactatgaggaacaactcaacaagcgcgtagggcacgtctacaagaaagcatttatgcaagttgtcgaggctgacatgctctctaagggtctactcggtggcgaggcgtggtcttcgtggcataaggaagactctattcatgtaggagtacgctgcatcgagatgctcattgagtcaaccggaatggttagcttacaccgccaaaatgctggcgtagtaggtcaagactctgagactatcgaactcgcacctgaatacgctgaggctatcgcaacccgtgcaggtgcgctggctggcatctctccgatgttccaaccttgcgtagttcctcctaagccgtggactggcattactggtggtggctattgggctaacggtcgtcgtcctctggcgctggtgcgtactcacagtaagaaaggtctgatgcgctacgaagacgtttacatgcctgaggtgtacaaagcgattaacattgcgcaaaacaccgcctggtcgatcaacaagtgggtcctggcggtcgccaacgtaatcaccaagtggaagcattgtccggtccgggacatccctgcgattgagcgtgaagaactcccgatgaaaccggaagacatcgacatgaatcctgaggctctcaccgcgtggaaacgtgctaaagctgctgtgtaccgcagagacaaggctcgcaagtctcgccgtatcttgcttgagttcatgcttgagcaagccaataagtttgctaaccataaggccatctggttcccttacaacatggactggcgcggtcgtgtttacgctgtgccgatgttcaacccgcaaggtaacgatatgaccaaaggactgcttacgctggcgaaaggtaaaccaatcggtaaggaaggttactactggctgaaaatccacggtgcaaactgtgcgggtgtcgataaggttccgttccctgagcgcatcaagttcattgaggaaaaccacgagaacatcatggcttgcgctaagtctccactggagaacacttggtgggctgagcaagatagtccgttctgcttccttgcgttctgctttgagtacgctggggtacagcaccacggcctgagctataactgctcccttccgctggcgtttgacgggtcttgctctggcatccagcacttctccgcgatgctccgagatgaggtaggtggtcgcgcggttaacttgcttcctagtgaaaccgttcaggacatctacgggattgttgctaagaaagtcaacgagattctacaagcagacgcaatcaatgggaccgataacgaagtagttaccgtgaccgatgagaacactggtgaaatctctgagaaagtcaagctgggcactaaggcactggctggtcaatggctggcttacggtgttactcgcagtgtgactaagcgttcagtcatgacgctggcttacgggtccaaagagttcggcttccgtcaacaagtgctgcgccacactattcagtgggctattgattccggcaagggtctgatgttcactcagccgaatcaggctgctggatacatggctaagctgatttgggaatctgtgagcgtgacggtggtagctgcggttgaagcaatgaactggcttaagtctgctgctaagctgctggctgctgaggtcaaagataagaagactggagagattcttcgcaagcgttgcgctgtgcattgggtaactcctgatggtttccctgtgtggcaggaatacaagaagcctattcagacgcgcttgaacctgatgttcctcggtcagttccgcttacagcctaccattaacaccaacaaagatagcgagattgatgcacgtaaacaggagtctggtatcgctcctaactttgtacacagccaagacggtagccaccttcgtaagactgtagtgtgggcacacgagaagtacggaatcgaatcttttgcactgattcacgactccttcggtaccattccggctgacgctgcgaacctgttcaaagcagtgcgcgaaactatggttgacacatatgagtcttgtgatgtactggctgatttctacgaccagttcgctgaccagttgcacgagtctcaattggacaaaatgccagcacttccggctaaaggtaacttgaacctccgtgacatcttagagtcggacttcgcgttcgcg

SEQ ID NO: 346 - protein, 890 aa, synthetic construct
  REGION 1..890: note = Variant of RNA polymerase
MHHHHHHMNTINIAKNDFSDIELAAIPFNTLADHYGEGLAREQLALEHESYEMGEARFRKMFERQLKAGEVADNAAAKPLITTLLPKMIARINDWFEEVKAKRGKRPTAFQFLQEIKPEAVAYITIKTTLACLTSADRTTVQAVASAIGRAIEDEARFGLIRDLEAKHFKKNYEEQLNKRVGHVYKKAFMQVVEADMLSKGLLGGEAWSSWHKEDSIHVGVRCIEMLIESTGMVSLHRQNAGVVGQDSETIELAPEYAEAIATRAGALAGISPMFQPCVVPPKPWTGITGGGYWANGRRPLALVRTHSKKGLMRYEDVYMPEVYKAINIAQNTAWSINKWVLAVANVITKWKHCPVRDIPAIEREELPMKPEDIDMNPEALTAWKRAKAAVYRRDKARKSRRILLEFMLEQANKFANHKAIWFPYNMDWRGRVYAVPMFNPQGNDMTKGLLTLAKGKPIGKEGYYWLKIHGANCAGVDKVPFPERIKFIEENHENIMACAKSPLENTWWAEQDSPFCFLAFCFEYAGVQHHGLSYNCSLPLAFDGSCSGIQHFSAMLRDEVGGRAVNLLPSETVQDIYGIVAKKVNEILQADAINGTDNEVVTVTDENTGEISEKVKLGTKALAGQWLAYGVTRSVTKRSVMTLAYGSKEFGFRQQVLRHTIQWAIDSGKGLMFTQPNQAAGYMAKLIWESVSVTVVAAVEAMNWLKSAAKLLAAEVKDKKTGEILRKRCAVHWVTPDGFPVWQEYKKPIQTRLNLMFLGQFRLQPTINTNKDSEIDARKQESGIAPNFVHSQDGSHLRKTVVWAHEKYGIESFALIHDSFGTIPADAANLFKAVRETMVDTYESCDVLADFYDQFADQLHESQLDKMPALPAKGNLNLRDILESDFAFA

SEQ ID NO: 347 - DNA, 2670 bp, synthetic construct
  misc_feature 1..2670: note = Variant of RNA polymerase
  source 1..2670: mol_type = other DNA
atgcaccatcaccatcaccatatgaacacgattaacatcgctaagaacgacttctctgacatcgaactggctgctatcccgttcaacactctggctgaccattacggtgagggcttagctcgcgaacagttggcccttgagcatgagtcttacgagatgggtgaagcacgtttccgcaagatgtttgagcgtcaacttaaagctggtgaggttgcggataacgctgccgccaagcctctcatcactaccctactccctaagatgattgcacgcatcaacgactggtttgaggaagtgaaagctaagcgcggcaagcgcccgacagccttccagttcctgcaagaaatcaagccggaagccgtagcgtacatcaccattaagaccactctgacttgcctaaccagtgcggaccgtacaaccgttcaggctgtagcaagcgcaatcggtcgggccattgaggacgaggctcgcttcggtcgtatccgtgaccttgaagctaagcacttcaagaaaaactatgaggaacaactcaacaagcgcgtagggcacgtctacaagaaagcatttatgcaagttgtcgaggctgacatgctctctaagggtctactcggtggcgaggcgtggtcttcgtggcataaggaagactctattcatgtaggagtacgctgcatcgagatgctcattgagtcaaccggaatggttagcttacaccgccaaaatgctggcgtagtaggtcaagactctgagactatcgaactcgcacctgaatacgctgaggctatcgcaacccgtgcaggtgcgctggctggcatctctccgatgttccaaccttgcgtagttcctcctaagccgtggactggcattactggtggtggctattgggctaacggtcgtcgtcctctggcgctggtgcgtactcacagtaagaaaggtctgatgcgctacgaagacgtttacatgcctgaggtgtacaaagcgattaacattgcgcaaaacaccgcctggtcgatcaacaagtgggtcctggcggtcgccaacgtaatcaccaagtggaagcattgtccggtccgggacatccctgcgattgagcgtgaagaactcccgatgaaaccggaagacatcgacatgaatcctgaggctctcaccgcgtggaaacgtgctaaagctgctgtgtaccgcagagacaaggctcgcaagtctcgccgtatcttgcttgagttcatgcttgagcaagccaataagtttgctaaccataaggccatctggttcccttacaacatggactggcgcggtcgtgtttacgctgtgccgatgttcaacccgcaaggtaacgatatgaccaaaggactgcttacgctggcgaaaggtaaaccaatcggtaaggaaggttactactggctgaaaatccacggtgcaaactgtgcgggtgtcgataaggttccgttccctgagcgcatcaagttcattgaggaaaaccacgagaacatcatggcttgcgctaagtctccactggagaacacttggtgggctgagcaagatagtccgttctgcttccttgcgttctgctttgagtacgctggggtacagcaccacggcctgagctataactgctcccttccgctggcgtttgacgggtcttgctctggcatccagcacttctccgcgatgctccgagatgaggtaggtggtcgcgcggttaacttgcttcctagtgaaaccgttcaggacatctacgggattgttgctaagaaagtcaacgagattctacaagcagacgcaatcaatgggaccgataacgaagtagttaccgtgaccgatgagaacacgggtgaaatctctgagaaagtcaagctgggcactaaggcactggctggtcaatggctggcttacggtgttactcgcagtgtgactaagcgttcagtcatgacgctggcttacgggtccaaagagttcggcttccgtcaacaagtgctgcgccacactattcagtgggctattgattccggcaagggtctgatgttcactcagccgaatcaggctgctggatacatggctaagctgatttgggaatctgtgagcgtgacggtggtagctgcggttgaagcaatgaactggcttaagtctgctgctaagctgctggctgctgaggtcaaagataagaagactggagagattcttcgcaagcgttgcgctgtgcattgggtaactcctgatggtttccctgtgtggcaggaatacaagaagcctattcagacgcgcttgaacctgatgttcctcggtcagttccgcttacagcctaccattaacaccaacaaagatagcgagattgatgcacgtaaacaggagtctggtatcgctcctaactttgtacacagccaagacggtagccaccttcgtaagactgtagtgtgggcacacgagaagtacggaatcgaatcttttgcactgattcacgactccttcggtaccattccggctgacgctgcgaacctgttcaaagcagtgcgcgaaactatggttgacacatatgagtcttgtgatgtactggctgatttctacgaccagttcgctgaccagttgcacgagtctcaattggacaaaatgccagcacttccggctaaaggtaacttgaacctccgtgacatcttagagtcggacttcgcgttcgcg

SEQ ID NO: 348 - protein, 890 aa, synthetic construct
  REGION 1..890: note = Variant of RNA polymerase
MHHHHHHMNTINIAKNDFSDIELAAIPFNTLADHYGEGLAREQLALEHESYEMGEARFRKMFERQLKAGEVADNAAAKPLITTLLPKMIARINDWFEEVKAKRGKRPTAFQFLQEIKPEAVAYITIKTTLTCLTSADRTTVQAVASAIGRAIEDEARFGRIRDLEAKHFKKNYEEQLNKRVGHVYKKAFMQVVEADMLSKGLLGGEAWSSWHKEDSIHVGVRCIEMLIESTGMVSLHRQNAGVVGQDSETIELAPEYAEAIATRAGALAGISPMFQPCVVPPKPWTGITGGGYWANGRRPLALVRTHSKKGLMRYEDVYMPEVYKAINIAQNTAWSINKWVLAVANVITKWKHCPVRDIPAIEREELPMKPEDIDMNPEALTAWKRAKAAVYRRDKARKSRRILLEFMLEQANKFANHKAIWFPYNMDWRGRVYAVPMFNPQGNDMTKGLLTLAKGKPIGKEGYYWLKIHGANCAGVDKVPFPERIKFIEENHENIMACAKSPLENTWWAEQDSPFCFLAFCFEYAGVQHHGLSYNCSLPLAFDGSCSGIQHFSAMLRDEVGGRAVNLLPSETVQDIYGIVAKKVNEILQADAINGTDNEVVTVTDENTGEISEKVKLGTKALAGQWLAYGVTRSVTKRSVMTLAYGSKEFGFRQQVLRHTIQWAIDSGKGLMFTQPNQAAGYMAKLIWESVSVTVVAAVEAMNWLKSAAKLLAAEVKDKKTGEILRKRCAVHWVTPDGFPVWQEYKKPIQTRLNLMFLGQFRLQPTINTNKDSEIDARKQESGIAPNFVHSQDGSHLRKTVVWAHEKYGIESFALIHDSFGTIPADAANLFKAVRETMVDTYESCDVLADFYDQFADQLHESQLDKMPALPAKGNLNLRDILESDFAFA

SEQ ID NO: 349 - DNA, 2670 bp, synthetic construct
  misc_feature 1..2670: note = Variant of RNA polymerase
  source 1..2670: mol_type = other DNA
atgcaccatcaccatcaccatatgaacacgattaacatcgctaagaacgacttctctgacatcgaactggctgctatcccgttcaacactctggctgaccattacggtgagcgtttagctcgcgaacagttggcccttgagcatgagtcttacgagatgggtgaagcacgtttccgcaagatgtttgagcgtcaacttaaagctggtgaggttgcggataacgctgccgccaagcctctcatcactaccctactccctaagatgattgcacgcatcaacgactggtttgaggaagtgaaagctaagcgcggcaagcgcccgacagccttccagttcctgcaagaaatcaagccggaagccgtagcgtacatcaccattaagaccactctggcttgcctaaccagtgcggaccgtacaaccgttcaggctgtagcaagcgcaatcggtcgggccattgaggacgaggctcgcttcggtcgtatccgtgaccttgaagctaagcacttcaagaaaaactatgaggaacaactcaacaagcgcgtagggcacgtcctgaagcacgcatttatgcaagttgtcgaggctgacatgctctctaagggtctactcggtggcgaggcgtggtcttcgtggcataaggaagactctattcatgtaggagtacgctgcatcgagatgctcattgagtcaaccggaatggttagcttacaccgccaaaatgctggcgtagtaggtcaagactctgagactatcgaactcgcacctgaatacgctgaggctatcgcaacccgtgcaggtgcgctggctggcatctctccgatgttccaaccttgcgtagttcctcctaagccgtggactggcattactggtggtggctattgggctaacggtcgtcgtcctctggcgctggtgcgtactcacagtaagaaaggtctgatgcgctacgaagacgtttacatgcctgaggtgtacaaagcgattaacattgcgcaaaacaccgcctggtcgatcaacaagtgggtcctggcggtcgccaacgtaatcaccaagtggaagcattgtccggtccgggacatccctgcgattgagcgtgaagaactcccgatgaaaccggaagacatcgacatgaatcctgaggctctcaccgcgtggaaacgtgctaaagctgctgtgtaccgcagagacaaggctcgcaagtctcgccgtatcttgcttgagttcatgcttgagcaagccaataagtttgctaaccataaggccatctggttcccttacaacatggactggcgcggtcgtgtttacgctgtgtcgatgttcaacccgcaaggtaacgatatgaccaaaggactgcttacgctggcgaaaggtaaaccaatcggtaaggaaggttactactggctgaaaatccacggtgcaaactgtgcgggtgtcgataaggttccgttccctgagcgcatcaagttcattgaggaaaaccacgagaacatcatggcttgcgctaagtctccactggagaacacttggtgggctgagcaagatagtccgttctgcttccttgcgttctgctttgagtacgctggggtacagcaccacggcctgagctataactgctcccttccgctggcgtttgacgggtcttgctctggcatccagcacttctccgcgatgctccgagatgaggtaggtggtcgcgcggttaacttgcttcctagtgaaaccgttcaggacatctacgggattgttgctaagaaagtcaacgagattctacaagcagacgcaatcaatgggaccgataacgaagtagttaccgtgaccgatgagaacacgggtgaaatctctgagaaagtcaagctgggcactaaggcactggctggtcaatggctggcttacggtgttactcgcagtgtgactaagcgttcagtcatgacgctggcttacgggtccaaagagttcggcttccgtcaacaagtgctgcgccacactattcagtgggctattgattccggcaagggtctgatgttcactcagccgaatcaggctgctggatacatggctaagctgatttgggaatctgtgagcgtgacggtggtagctgcggttgaagcaatgaactggcttaagtctgctgctaagctgctggctgctgaggtcaaagataagaagactggagagattcttcgcaagcgttgcgctgtgcattgggtaactcctgatggtttccctgtgtggcaggaatacaagaagcctattcagacgcgcttgaacctgatgttcctcggtcagttccgcttacagcctaccattaacaccaacaaagatagcgagattgatgcacgtaaacaggagtctggtatcgctcctaactttgtacacagccaagacggtagccaccttcgtaagactgtagtgtgggcacacgagaagtacggaatcgaatcttttgcactgattcacgactccttcggtaccattccggctgacgctgcgaacctgttcaaagcagtgcgcgaaactatggttgacacatatgagtcttgtgatgtactggctgatttctacgaccagttcgctgaccagttgcacgagtctcaattggacaaaatgccagcacttccggctaaaggtaacttgaacctccgtgacatcttagagtcggacttcgcgttcgcg

SEQ ID NO: 350 - protein, 890 aa, synthetic construct
  REGION 1..890: note = Variant of RNA polymerase
MHHHHHHMNTINIAKNDFSDIELAAIPFNTLADHYGERLAREQLALEHESYEMGEARFRKMFERQLKAGEVADNAAAKPLITTLLPKMIARINDWFEEVKAKRGKRPTAFQFLQEIKPEAVAYITIKTTLACLTSADRTTVQAVASAIGRAIEDEARFGRIRDLEAKHFKKNYEEQLNKRVGHVLKHAFMQVVEADMLSKGLLGGEAWSSWHKEDSIHVGVRCIEMLIESTGMVSLHRQNAGVVGQDSETIELAPEYAEAIATRAGALAGISPMFQPCVVPPKPWTGITGGGYWANGRRPLALVRTHSKKGLMRYEDVYMPEVYKAINIAQNTAWSINKWVLAVANVITKWKHCPVRDIPAIEREELPMKPEDIDMNPEALTAWKRAKAAVYRRDKARKSRRILLEFMLEQANKFANHKAIWFPYNMDWRGRVYAVSMFNPQGNDMTKGLLTLAKGKPIGKEGYYWLKIHGANCAGVDKVPFPERIKFIEENHENIMACAKSPLENTWWAEQDSPFCFLAFCFEYAGVQHHGLSYNCSLPLAFDGSCSGIQHFSAMLRDEVGGRAVNLLPSETVQDIYGIVAKKVNEILQADAINGTDNEVVTVTDENTGEISEKVKLGTKALAGQWLAYGVTRSVTKRSVMTLAYGSKEFGFRQQVLRHTIQWAIDSGKGLMFTQPNQAAGYMAKLIWESVSVTVVAAVEAMNWLKSAAKLLAAEVKDKKTGEILRKRCAVHWVTPDGFPVWQEYKKPIQTRLNLMFLGQFRLQPTINTNKDSEIDARKQESGIAPNFVHSQDGSHLRKTVVWAHEKYGIESFALIHDSFGTIPADAANLFKAVRETMVDTYESCDVLADFYDQFADQLHESQLDKMPALPAKGNLNLRDILESDFAFA

SEQ ID NO: 351 - DNA, 2670 bp, synthetic construct
  misc_feature 1..2670: note = Variant of RNA polymerase
  source 1..2670: mol_type = other DNA
atgcaccatcaccatcaccatatgaacacgattaacatcgctaagaacgacttctctgacatcgaactggctgctatcccgttcaacactctggctgaccattacggtgagggcttagctcgcgaacagttggcccttgagcatgagtcttacgagatgggtgaagcacgtttccgcaagatgtttgagcgtcaacttaaagctggtgaggttgcggataacgctgccgccaagcctctcatcactaccctactccctaagatgattgcacgcatcaacgactggtttgaggaagtgaaagctaagcgcggcaagcgcccgacagccttccagttcctgcaagaaatcaagccggaagccgtagcgtacatcaccattaagaccactctggcttgcctaaccagtgcggaccgtacaaccgttcaggctgtagcaagcgcaatcggtcgggccattgaggacgaggctcgcttcggtcgtatccgtgaccttgaagctaagcacttcaagaaaaactatgaggaacaactcaacaagcgcgtagggcacgtcctgaagcacgcatttatgcaagttgtcgaggctgacatgctctctaagggtctactcggtggcgaggcgtggtcttcgtggcataaggaagactctattcatgtaggagtacgctgcatcgagatgctcattgagtcaaccggaatggttagcttacaccgccaaaatgctggcgtagtaggtcaagactctgagactatcgaactcgcacctgaatacgctgaggctatcgcaacccgtgcaggtgcgctggctggcatctctccgatgttccaaccttgcgtagttcctcctaagccgtggactggcattactggtggtggctattgggctaacggtcgtcgtcctctggcgctggtgcgtactcacagtaagaaaggtctgatgcgctacgaagacgtttacatgcctgaggtgtacaaagcgattaacattgcgcaaaacaccgcctggtcgatcaacaagtgggtcctggcggtcgccaacgtaatcaccaagtggaagcattgtccggtccgggacatccctgcgattgagcgtgaagaactcccgatgaaaccggaagacatcgacatgaatcctgaggctctcaccgcgtggaaacgtgctaaagctgctgtgtaccgcagagacaaggctcgcaagtctcgccgtatcttgcttgagttcatgcttgagcaagccaataagtttgctaaccataaggccatctggttcccttacaacatggactggcgcggtcgtgtttacgctgtgccgatgttcaacccgcaaggtaacgatatgaccaaaggactgcttacgctggcgaaaggtaaaccaatcggtaaggaaggttactactggctgaaaatccacggtgcaaactgtgcgggtgtcgataaggttccgttccctgagcgcatcaagttcattgaggaaaaccacgagaacatcatggcttgcgctaagtctccactggagaacacttggtgggctgagcaagatagtccgttctgcttccttgcgttctgctttgagtacgctggggtacagcaccacggcctgagctataactgctcccttccgctggcgtttgacgggtcttgctctggcatccagcacttctccgcgatgctccgagatgaggtaggtggtcgcgcggttaacttgcttcctagtgaaaccgttcaggacatctacgggattgttgctaagaaagtcaacgagattctacaagcagacgcaatcaatgggaccgataacgaagtagttaccgtgaccgatgagaacactggtgaaatctctgagaaagtcaagctgggcactaaggcactggctggtcaatggctggcttacggtgttactcgcagtgtgactaagcgttcagtcatgacgctggcttacgggtccaaagagttcggcttccgtcaacaagtgctgcgccacactattcagtgggctattgattccggcaagggtctgatgttcactcagccgaatcaggctgctggatacatggctaagctgatttgggaatctgtgagcgtgacggtggtagctgcggttgaagcaatgaactggcttaagtctgctgctaagctgctggctgctgaggtcaaagataagaagactggagagattcttcgcaagcgttgcgctgtgcattgggtaactcctgatggtttccctgtgtggcaggaatacaagaagcctattcagacgcgcttgaacctgatgttcctcggtcagttccgcttacagcctaccattaacaccaacaaagatagcgagattgatgcacgtaaacaggagtctggtatcgctcctaactttgtacacagccaagacggtagccaccttcgtaagactgtagtgtgggcacacgagaagtacggaatcgaatcttttgcactgattcacgactccttcggtaccattccggctgacgctgcgaacctgttcaaagcagtgcgcgaaactatggttgacacatatgagtcttgtgatgtactggctgatttctacgaccagttcgctgaccagttgcacgagtctcaattggacaaaatgccagcacttccggctaaaggtaacttgaacctccgtgacatcttagagtcggacttcgcgttcgcg

SEQ ID NO: 352 - protein, 890 aa, synthetic construct
  REGION 1..890: note = Variant of RNA polymerase
MHHHHHHMNTINIAKNDFSDIELAAIPFNTLADHYGEGLAREQLALEHESYEMGEARFRKMFERQLKAGEVADNAAAKPLITTLLPKMIARINDWFEEVKAKRGKRPTAFQFLQEIKPEAVAYITIKTTLACLTSADRTTVQAVASAIGRAIEDEARFGRIRDLEAKHFKKNYEEQLNKRVGHVLKHAFMQVVEADMLSKGLLGGEAWSSWHKEDSIHVGVRCIEMLIESTGMVSLHRQNAGVVGQDSETIELAPEYAEAIATRAGALAGISPMFQPCVVPPKPWTGITGGGYWANGRRPLALVRTHSKKGLMRYEDVYMPEVYKAINIAQNTAWSINKWVLAVANVITKWKHCPVRDIPAIEREELPMKPEDIDMNPEALTAWKRAKAAVYRRDKARKSRRILLEFMLEQANKFANHKAIWFPYNMDWRGRVYAVPMFNPQGNDMTKGLLTLAKGKPIGKEGYYWLKIHGANCAGVDKVPFPERIKFIEENHENIMACAKSPLENTWWAEQDSPFCFLAFCFEYAGVQHHGLSYNCSLPLAFDGSCSGIQHFSAMLRDEVGGRAVNLLPSETVQDIYGIVAKKVNEILQADAINGTDNEVVTVTDENTGEISEKVKLGTKALAGQWLAYGVTRSVTKRSVMTLAYGSKEFGFRQQVLRHTIQWAIDSGKGLMFTQPNQAAGYMAKLIWESVSVTVVAAVEAMNWLKSAAKLLAAEVKDKKTGEILRKRCAVHWVTPDGFPVWQEYKKPIQTRLNLMFLGQFRLQPTINTNKDSEIDARKQESGIAPNFVHSQDGSHLRKTVVWAHEKYGIESFALIHDSFGTIPADAANLFKAVRETMVDTYESCDVLADFYDQFADQLHESQLDKMPALPAKGNLNLRDILESDFAFA

SEQ ID NO: 353 - DNA, 2670 bp, synthetic construct
  misc_feature 1..2670: note = Variant of RNA polymerase
  source 1..2670: mol_type = other DNA
atgcaccatcaccatcaccatatgaacacgattaacatcgctaagaacgacttctctgacatcgaactggctgctatcccgttcaacactctggctgaccattacggtgagggtttagctcgcgaacagttggcccttgagcatgagtcttacgagatgggtgaagcacgtttccgcaagatgtttgagcgtcaacttaaagctggtgaggttgcggataacgctgccgccaagcctctcatcactaccctactccctaagatgattgcacgcatcaacgactggtttgaggaagtgaaagctaagcgcggcaagcgcccgacagccttccagttcctgcaagaaatcaagccggaagccgtagcgtacatcaccattaagaccactctggcttgcctaaccagtgcggaccgtacaaccgttcaggctgtagcaagcgcaatcggtcgggccattgaggacgaggctcgcttcggtcgtatccgtgaccttgaagctaagcacttcaagaaaaactatgaggaacaactcaacaagcgcgtagggcacgtcctgaagctggcatttatgcaagttgtcgaggctgacatgctctctaagggtctactcggtggcgaggcgtggtcttcgtggcataaggaagactctattcatgtaggagtacgctgcatcgagatgctcattgagtcaaccggaatggttagcttacaccgccaaaatgctggcgtagtaggtcaagactctgagactatcgaactcgcacctgaatacgctgaggctatcgcaacccgtgcaggtgcgctggctggcatctctccgatgttccaaccttgcgtagttcctcctaagccgtggactggcattactggtggtggctattgggctaacggtcgtcgtcctctggcgctggtgcgtactcacagtaagaaaggtctgatgcgctacgaagacgtttacatgcctgaggtgtacaaagcgattaacattgcgcaaaacaccgcctggtcgatcaacaagtgggtcctggcggtcgccaacgtaatcaccaagtggaagcattgtccggtccgggacatccctgcgattgagcgtgaagaactcccgatgaaaccggaagacatcgacatgaatcctgaggctctcaccgcgtggaaacgtgctaaagctgctgtgtaccgcagagacaaggctcgcaagtctcgccgtatcttgcttgagttcatgcttgagcaagccaataagtttgctaaccataaggccatctggttcccttacaacatggactggcgcggtcgtgtttacgctgtgccgatgttcaacccgcaaggtaacgatatgaccaaaggactgcttacgctggcgaaaggtaaaccaatcggtaaggaaggttactactggctgaaaatccacggtgcaaactgtgcgggtgtcgataaggttccgttccctgagcgcatcaagttcattgaggaaaaccacgagaacatcatggcttgcgctaagtctccactggagaacacttggtgggctgagcaagatagtccgttctgcttccttgcgttctgctttgagtacgctggggtacagcaccacggcctgagctataactgctcccttccgctggcgtttgacgggtcttgctctggcatccagcacttctccgcgatgctccgagatgaggtaggtggtcgcgcggttaacttgcttcctagtgaaaccgttcaggacatctacgggattgttgctaagaaagtcaacgagattctacaagcagacgcaatcaatgggaccgataacgaagtagttaccgtgaccgatgagaacactggtgaaatctctgagaaagtcaagctgggcactaaggcactggctggtcaatggctggcttacggtgttactcgcagtgtgactaagcgttcagtcatgacgctggcttacgggtccaaagagttcggcttccgtcaacaagtgctgcgccacactattcagtgggctattgattccggcaagggtctgatgttcactcagccgaatcaggctgctggatacatggctaagctgatttgggaatctgtgagcgtgacggtggtagctgcggttgaagcaatgaactggcttaagtctgctgctaagctgctggctgctgaggtcaaagataagaagactggagagattcttcgcaagcgttgcgctgtgcattgggtaactcctgatggtttccctgtgtggcaggaatacaagaagcctattcagacgcgcttgaacctgatgttcctcggtcagttccgcttacagcctaccattaacaccaacaaagatagcgagattgatgcacgtaaacaggagtctggtatcgctcctaactttgtacacagccaagacggtagccaccttcgtaagactgtagtgtgggcacacgagaagtacggaatcgaatcttttgcactgattcacgactccttcggtaccattccggctgacgctgcgaacctgttcaaagcagtgcgcgaaactatggttgacacatatgagtcttgtgatgtactggctgatttctacgaccagttcgctgaccagttgcacgagtctcaattggacaaaatgccagcacttccggctaaaggtaacttgaacctccgtgacatcttagagtcggacttcgcgttcgcg

SEQ ID NO: 354 - protein, 890 aa, synthetic construct
  REGION 1..890: note = Variant of RNA polymerase
MHHHHHHMNTINIAKNDFSDIELAAIPFNTLADHYGEGLAREQLALEHESYEMGEARFRKMFERQLKAGEVADNAAAKPLITTLLPKMIARINDWFEEVKAKRGKRPTAFQFLQEIKPEAVAYITIKTTLACLTSADRTTVQAVASAIGRAIEDEARFGRIRDLEAKHFKKNYEEQLNKRVGHVLKLAFMQVVEADMLSKGLLGGEAWSSWHKEDSIHVGVRCIEMLIESTGMVSLHRQNAGVVGQDSETIELAPEYAEAIATRAGALAGISPMFQPCVVPPKPWTGITGGGYWANGRRPLALVRTHSKKGLMRYEDVYMPEVYKAINIAQNTAWSINKWVLAVANVITKWKHCPVRDIPAIEREELPMKPEDIDMNPEALTAWKRAKAAVYRRDKARKSRRILLEFMLEQANKFANHKAIWFPYNMDWRGRVYAVPMFNPQGNDMTKGLLTLAKGKPIGKEGYYWLKIHGANCAGVDKVPFPERIKFIEENHENIMACAKSPLENTWWAEQDSPFCFLAFCFEYAGVQHHGLSYNCSLPLAFDGSCSGIQHFSAMLRDEVGGRAVNLLPSETVQDIYGIVAKKVNEILQADAINGTDNEVVTVTDENTGEISEKVKLGTKALAGQWLAYGVTRSVTKRSVMTLAYGSKEFGFRQQVLRHTIQWAIDSGKGLMFTQPNQAAGYMAKLIWESVSVTVVAAVEAMNWLKSAAKLLAAEVKDKKTGEILRKRCAVHWVTPDGFPVWQEYKKPIQTRLNLMFLGQFRLQPTINTNKDSEIDARKQESGIAPNFVHSQDGSHLRKTVVWAHEKYGIESFALIHDSFGTIPADAANLFKAVRETMVDTYESCDVLADFYDQFADQLHESQLDKMPALPAKGNLNLRDILESDFAFA

SEQ ID NO: 355 - DNA, 2670 bp, synthetic construct
  misc_feature 1..2670: note = Variant of RNA polymerase
  source 1..2670: mol_type = other DNA
atgcaccatcaccatcaccatatgaacacgattaacatcgctaagaacgacttctctgacatcgaactggctgctatcccgttcaacactctggctgaccattacggtgagggcttagctcgcgaacagttggcccttgagcatgagtcttacgagatgggtgaagcacgtttccgcaagatgtttgagcgtcaacttaaagctggtgaggttgcggataacgctgccgccaagcctctcatcactaccctactccctaagatgattgcacgcatcaacgactggtttgaggaagtgaaagctaagcgcggcaagcgcccgacagccttccagttcctgcaagaaatcaagccggaagccgtagcgtacatcaccattaagaccactctggcttgcctaaccagtgcggaccgtacaaccgttcaggctgtagcaagcgcaatcggtcgggccattgaggacgaggctcgcttcggtcgtatccgtgaccttgaagctaagcacttcaagaaaaactatgaggaacaactcaacaagcgcgtagggcacgtctacaagaaagcatttatgcaagttgtcgaggctgacatgctctctaagggtctactcggtggcgaggcgtggtcttcgtggcataaggaagactctattcatgtaggagtacgctgcatcgagatgctcattgagtcaaccggaatggttagcttacaccgccaaaatgctggcgtagtaggtcaagactctgagactatcgaactcgcacctgaatacgctgaggctatcgcaacccgtgcaggtgcgctggctggcatctctccgatgttccaaccttgcgtagttcctcctaagccgtggactggcattactggtggtggctattgggctaacggtcgtcgtcctctggcgctggtgcgtactcacagtaagaaaggtctgatgcgctacgaagacgtttacatgcctgaggtgtacaaagcgattaacattgcgcaaaacaccgcctggtcgatcaacaagtgggtcctggcggtcgccaacgtaatcaccaagtggaagcattgtccggtccgggacatccctgcgattgagcgtgaagaactcccgatgaaaccggaagacatcgacatgaatcctgaggctctcaccgcgtggaaacgtgctaaagctgctgtgtaccgcagagacaaggctcgcaagtctcgccgtatcttgcttgagttcatgcttgagcaagccaataagtttgctaaccataaggccatctggttcccttacaacatggactggcgcggtcgtgtttacgctgtgtcgatgttcaacccgcaaggtaacgatatgaccaaaggactgcttacgctggcgaaaggtaaaccaatcggtaaggaaggttactactggctgaaaatccacggtgcaaactgtgcgggtgtcgataaggttccgttccctgagcgcatcaagttcattgaggaaaaccacgagaacatcatggcttgcgctaagtctccactggagaacacttggtgggctgagcaagatagtccgttctgcttccttgcgttctgctttgagtacgctggggtacagcaccacggcctgagctataactgctcccttccgctggcgtttgacgggtcttgctctggcatccagcacttctccgcgatgctccgagatgaggtaggtggtcgcgcggttaacttgcttcctagtgaaaccgttcaggacatctacgggattgttgctaagaaagtcaacgagattctacaagcagacgcaatcaatgggaccgataacgaagtagttaccgtgaccgatgagaactgcggtgaaatctctgagaaagtcaagctgggcactaaggcactggctggtcaatggctggcttacggtgttactcgcagtgtgactaagcgttcagtcatgacgctggcttacgggtccaaagagttcggcttccgtcaacaagtgctgcgccacactattcagtgggctattgattccggcaagggtctgatgttcactcagccgaatcaggctgctggatacatggctaagctgatttgggaatctgtgagcgtgacggtggtagctgcggttgaagcaatgaactggcttaagtctgctgctaagctgctggctgctgaggtcaaagataagaagactggagagattcttcgcaagcgttgcgctgtgcattgggtaactcctgatggtttccctgtgtggcaggaatacaagaagcctattcagacgcgcttgaacctgatgttcctcggtcagttccgcttacagcctaccattaacaccaacaaagatagcgagattgatgcacgtaaacaggagtctggtatcgctcctaactttgtacacagccaagacggtagccaccttcgtaagactgtagtgtgggcacacgagaagtacggaatcgaatcttttgcactgattcacgactccttcggtaccattccggctgacgctgcgaacctgttcaaagcagtgcgcgaaactatggttgacacatatgagtcttgtgatgtactggctgatttctacgaccagttcgctgaccagttgcacgagtctcaattggacaaaatgccagcacttccggctaaaggtaacttgaacctccgtgacatcttagagtcggacttcgcgttcgcg

SEQ ID NO: 356 - protein, 890 aa, synthetic construct
  REGION 1..890: note = Variant of RNA polymerase
MHHHHHHMNTINIAKNDFSDIELAAIPFNTLADHYGEGLAREQLALEHESYEMGEARFRKMFERQLKAGEVADNAAAKPLITTLLPKMIARINDWFEEVKAKRGKRPTAFQFLQEIKPEAVAYITIKTTLACLTSADRTTVQAVASAIGRAIEDEARFGRIRDLEAKHFKKNYEEQLNKRVGHVYKKAFMQVVEADMLSKGLLGGEAWSSWHKEDSIHVGVRCIEMLIESTGMVSLHRQNAGVVGQDSETIELAPEYAEAIATRAGALAGISPMFQPCVVPPKPWTGITGGGYWANGRRPLALVRTHSKKGLMRYEDVYMPEVYKAINIAQNTAWSINKWVLAVANVITKWKHCPVRDIPAIEREELPMKPEDIDMNPEALTAWKRAKAAVYRRDKARKSRRILLEFMLEQANKFANHKAIWFPYNMDWRGRVYAVSMFNPQGNDMTKGLLTLAKGKPIGKEGYYWLKIHGANCAGVDKVPFPERIKFIEENHENIMACAKSPLENTWWAEQDSPFCFLAFCFEYAGVQHHGLSYNCSLPLAFDGSCSGIQHFSAMLRDEVGGRAVNLLPSETVQDIYGIVAKKVNEILQADAINGTDNEVVTVTDENCGEISEKVKLGTKALAGQWLAYGVTRSVTKRSVMTLAYGSKEFGFRQQVLRHTIQWAIDSGKGLMFTQPNQAAGYMAKLIWESVSVTVVAAVEAMNWLKSAAKLLAAEVKDKKTGEILRKRCAVHWVTPDGFPVWQEYKKPIQTRLNLMFLGQFRLQPTINTNKDSEIDARKQESGIAPNFVHSQDGSHLRKTVVWAHEKYGIESFALIHDSFGTIPADAANLFKAVRETMVDTYESCDVLADFYDQFADQLHESQLDKMPALPAKGNLNLRDILESDFAFA

SEQ ID NO: 357 - DNA, 2670 bp, synthetic construct
  misc_feature 1..2670: note = Variant of RNA polymerase
  source 1..2670: mol_type = other DNA
atgcaccatcaccatcaccatatgaacacgattaacatcgctaagaacgacttctctgacatcgaactggctgctatcccgttcaacactctggctgaccattacggtgagcgtttagctcgcgaacagttggcccttgagcatgagtcttacgagatgggtgaagcacgtttccgcaagatgtttgagcgtcaacttaaagctggtgaggttgcggataacgctgccgccaagcctctcatcactaccctactccctaagatgattgcacgcatcaacgactggtttgaggaagtgaaagctaagcgcggcaagcgcccgacagccttccagttcctgcaagaaatcaagccggaagccgtagcgtacatcaccattaagaccactctggcttgcctaaccagtgcggaccgtacaaccgttcaggctgtagcaagcgcaatcggtcgggccattgaggacgaggctcgcttcggtcgtatccgtgaccttgaagctaagcacttcaagaaaaactatgaggaacaactcaacaagcgcgtagggcacgtctacaagaaagcatttatgcaagttgtcgaggctgacatgctctctaagggtctactcggtggcgaggcgtggtcttcgtggcataaggaagactctattcatgtaggagtacgctgcatcgagatgctcattgagtcaaccggaatggttagcttacaccgccaaaatgctggcgtagtaggtcaagactctgagactatcgaactcgcacctgaatacgctgaggctatcgcaacccgtgcaggtgcgctggctggcatctctccgatgttccaaccttgcgtagttcctcctaagccgtggactggcattactggtggtggctattgggctaacggtcgtcgtcctctggcgctggtgcgtactcacagtaagaaaggtctgatgcgctacgaagacgtttacatgcctgaggtgtacaaagcgattaacattgcgcaaaacaccgcctggtcgatcaacaagtgggtcctggcggtcgccaacgtaatcaccaagtggaagcattgtccggtccgggacatccctgcgattgagcgtgaagaactcccgatgaaaccggaagacatcgacatgaatcctgaggctctcaccgcgtggaaacgtgctaaagctgctgtgtaccgcagagacaaggctcgcaagtctcgccgtatcttgcttgagttcatgcttgagcaagccaataagtttgctaaccataaggccatctggttcccttacaacatggactggcgcggtcgtgtttacgctgtgccgatgttcaacccgcaaggtaacgatatgaccaaaggactgcttacgctggcgaaaggtaaaccaatcggtaaggaaggttactactggctgaaaatccacggtgcaaactgtgcgggtgtcgataaggttccgttccctgagcgcatcaagttcattgaggaaaaccacgagaacatcatggcttgcgctaagtctccactggagaacacttggtgggctgagcaagatagtccgttctgcttccttgcgttctgctttgagtacgctggggtacagcaccacggcctgagctataactgctcccttccgctggcgtttgacgggtcttgctctggcatccagcacttctccgcgatgctccgagatgaggtaggtggtcgcgcggttaacttgcttcctagtgaaaccgttcaggacatctacgggattgttgctaagaaagtcaacgagattctacaagcagacgcaatcaatgggaccgataacgaagtagttaccgtgaccgatgagaacccgggtgaaatctctgagaaagtcaagctgggcactaaggcactggctggtcaatggctggcttacggtgttactcgcagtgtgactaagcgttcagtcatgacgctggcttacgggtccaaagagttcggcttccgtcaacaagtgctgcgccacactattcagtgggctattgattccggcaagggtctgatgttcactcagccgaatcaggctgctggatacatggctaagctgatttgggaatctgtgagcgtgacggtggtagctgcggttgaagcaatgaactggcttaagtctgctgctaagctgctggctgctgaggtcaaagataagaagactggagagattcttcgcaagcgttgcgctgtgcattgggtaactcctgatggtttccctgtgtggcaggaatacaagaagcctattcagacgcgcttgaacctgatgttcctcggtcagttccgcttacagcctaccattaacaccaacaaagatagcgagattgatgcacgtaaacaggagtctggtatcgctcctaactttgtacacagccaagacggtagccaccttcgtaagactgtagtgtgggcacacgagaagtacggaatcgaatcttttgcactgattcacgactccttcggtaccattccggctgacgctgcgaacctgttcaaagcagtgcgcgaaactatggttgacacatatgagtcttgtgatgtactggctgatttctacgaccagttcgctgaccagttgcacgagtctcaattggacaaaatgccagcacttccggctaaaggtaacttgaacctccgtgacatcttagagtcggacttcgcgttcgcg

SEQ ID NO: 358 - protein, 890 aa, synthetic construct
  REGION 1..890: note = Variant of RNA polymerase
MHHHHHHMNTINIAKNDFSDIELAAIPFNTLADHYGERLAREQLALEHESYEMGEARFRKMFERQLKAGEVADNAAAKPLITTLLPKMIARINDWFEEVKAKRGKRPTAFQFLQEIKPEAVAYITIKTTLACLTSADRTTVQAVASAIGRAIEDEARFGRIRDLEAKHFKKNYEEQLNKRVGHVYKKAFMQVVEADMLSKGLLGGEAWSSWHKEDSIHVGVRCIEMLIESTGMVSLHRQNAGVVGQDSETIELAPEYAEAIATRAGALAGISPMFQPCVVPPKPWTGITGGGYWANGRRPLALVRTHSKKGLMRYEDVYMPEVYKAINIAQNTAWSINKWVLAVANVITKWKHCPVRDIPAIEREELPMKPEDIDMNPEALTAWKRAKAAVYRRDKARKSRRILLEFMLEQANKFANHKAIWFPYNMDWRGRVYAVPMFNPQGNDMTKGLLTLAKGKPIGKEGYYWLKIHGANCAGVDKVPFPERIKFIEENHENIMACAKSPLENTWWAEQDSPFCFLAFCFEYAGVQHHGLSYNCSLPLAFDGSCSGIQHFSAMLRDEVGGRAVNLLPSETVQDIYGIVAKKVNEILQADAINGTDNEVVTVTDENPGEISEKVKLGTKALAGQWLAYGVTRSVTKRSVMTLAYGSKEFGFRQQVLRHTIQWAIDSGKGLMFTQPNQAAGYMAKLIWESVSVTVVAAVEAMNWLKSAAKLLAAEVKDKKTGEILRKRCAVHWVTPDGFPVWQEYKKPIQTRLNLMFLGQFRLQPTINTNKDSEIDARKQESGIAPNFVHSQDGSHLRKTVVWAHEKYGIESFALIHDSFGTIPADAANLFKAVRETMVDTYESCDVLADFYDQFADQLHESQLDKMPALPAKGNLNLRDILESDFAFA

SEQ ID NO: 359 - DNA, 2670 bp, synthetic construct
  misc_feature 1..2670: note = Variant of RNA polymerase
  source 1..2670: mol_type = other DNA
atgcaccatcaccatcaccatatgaacacgattaacatcgctaagaacgacttctctgacatcgaactggctgctatcccgttcaacactctggctgaccattacggtgagcgtttagctcgcgaacagttggcccttgagcatgagtcttacgagatgggtgaagcacgtttccgcaagatgtttgagcgtcaacttaaagctggtgaggttgcggataacgctgccgccaagcctctcatcactaccctactccctaagatgattgcacgcatcaacgactggtttgaggaagtgaaagctaagcgcggcaagcgcccgacagccttccagttcctgcaagaaatcaagccggaagccgtagcgtacatcaccattaagaccactctggcttgcctaaccagtgcggaccgtacaaccgttcaggctgtagcaagcgcaatcggtcgggccattgaggacgaggctcgcttcggtcgtatccgtgaccttgaagctaagcacttcaagaaaaactatgaggaacaactcaacaagcgcgtagggcacgtcctgaagcacgcatttatgcaagttgtcgaggctgacatgctctctaagggtctactcggtggcgaggcgtggtcttcgtggcataaggaagactctattcatgtaggagtacgctgcatcgagatgctcattgagtcaaccggaatggttagcttacaccgccaaaatgctggcgtagtaggtcaagactctgagactatcgaactcgcacctgaatacgctgaggctatcgcaacccgtgcaggtgcgctggctggcatctctccgatgttccaaccttgcgtagttcctcctaagccgtggactggcattactggtggtggctattgggctaacggtcgtcgtcctctggcgctggtgcgtactcacagtaagaaaggtctgatgcgctacgaagacgtttacatgcctgaggtgtacaaagcgattaacattgcgcaaaacaccgcctggtcgatcaacaagtgggtcctggcggtcgccaacgtaatcaccaagtggaagcattgtccggtccgggacatccctgcgattgagcgtgaagaactcccgatgaaaccggaagacatcgacatgaatcctgaggctctcaccgcgtggaaacgtgctaaagctgctgtgtaccgcagagacaaggctcgcaagtctcgccgtatcttgcttgagttcatgcttgagcaagccaataagtttgctaaccataaggccatctggttcccttacaacatggactggcgcggtcgtgtttacgctgtgtcgatgttcaacccgcaaggtaacgatatgaccaaaggactgcttacgctggcgaaaggtaaaccaatcggtaaggaaggttactactggctgaaaatccacggtgcaaactgtgcgggtgtcgataaggttccgttccctgagcgcatcaagttcattgaggaaaaccacgagaacatcatggcttgcgctaagtctccactggagaacacttggtgggctgagcaagatagtccgttctgcttccttgcgttctgctttgagtacgctggggtacagcaccacggcctgagctataactgctcccttccgctggcgtttgacgggtcttgctctggcatccagcacttctccgcgatgctccgagatgaggtaggtggtcgcgcggttaacttgcttcctagtgaaaccgttcaggacatctacgggattgttgctaagaaagtcaacgagattctacaagcagacgcaatcaatgggaccgataacgaagtagttaccgtgaccgatgagaactgcggtgaaatctctgagaaagtcaagctgggcactaaggcactggctggtcaatggctggcttacggtgttactcgcagtgtgactaagcgttcagtcatgacgctggcttacgggtccaaagagttcggcttccgtcaacaagtgctgcgccacactattcagtgggctattgattccggcaagggtctgatgttcactcagccgaatcaggctgctggatacatggctaagctgatttgggaatctgtgagcgtgacggtggtagctgcggttgaagcaatgaactggcttaagtctgctgctaagctgctggctgctgaggtcaaagataagaaaactggagagattcttcgcaagcgttgcgctgtgcattgggtaactcctgatggtttccctgtgtggcaggaatacaagaagcctattcagacgcgcttgaacctgatgttcctcggtcagttccgcttacagcctaccattaacaccaacaaagatagcgagattgatgcacgtaaacaggagtctggtatcgctcctaactttgtacacagccaagacggtagccaccttcgtaagactgtagtgtgggcacacgagaagtacggaatcgaatcttttgcactgattcacgactccttcggtaccattccggctgacgctgcgaacctgttcaaagcagtgcgcgaaactatggttgacacatatgagtcttgtgatgtactggctgatttctacgaccagttcgctgaccagttgcacgagtctcaattggacaaaatgccagcacttccggctaaaggtaacttgaacctccgtgacatcttagagtcggacttcgcgttcgcg

SEQ ID NO: 360 - protein, 890 aa, synthetic construct
  REGION 1..890: note = Variant of RNA polymerase
MHHHHHHMNTINIAKNDFSDIELAAIPFNTLADHYGERLAREQLALEHESYEMGEARFRKMFERQLKAGEVADNAAAKPLITTLLPKMIARINDWFEEVKAKRGKRPTAFQFLQEIKPEAVAYITIKTTLACLTSADRTTVQAVASAIGRAIEDEARFGRIRDLEAKHFKKNYEEQLNKRVGHVLKHAFMQVVEADMLSKGLLGGEAWSSWHKEDSIHVGVRCIEMLIESTGMVSLHRQNAGVVGQDSETIELAPEYAEAIATRAGALAGISPMFQPCVVPPKPWTGITGGGYWANGRRPLALVRTHSKKGLMRYEDVYMPEVYKAINIAQNTAWSINKWVLAVANVITKWKHCPVRDIPAIEREELPMKPEDIDMNPEALTAWKRAKAAVYRRDKARKSRRILLEFMLEQANKFANHKAIWFPYNMDWRGRVYAVSMFNPQGNDMTKGLLTLAKGKPIGKEGYYWLKIHGANCAGVDKVPFPERIKFIEENHENIMACAKSPLENTWWAEQDSPFCFLAFCFEYAGVQHHGLSYNCSLPLAFDGSCSGIQHFSAMLRDEVGGRAVNLLPSETVQDIYGIVAKKVNEILQADAINGTDNEVVTVTDENCGEISEKVKLGTKALAGQWLAYGVTRSVTKRSVMTLAYGSKEFGFRQQVLRHTIQWAIDSGKGLMFTQPNQAAGYMAKLIWESVSVTVVAAVEAMNWLKSAAKLLAAEVKDKKTGEILRKRCAVHWVTPDGFPVWQEYKKPIQTRLNLMFLGQFRLQPTINTNKDSEIDARKQESGIAPNFVHSQDGSHLRKTVVWAHEKYGIESFALIHDSFGTIPADAANLFKAVRETMVDTYESCDVLADFYDQFADQLHESQLDKMPALPAKGNLNLRDILESDFAFA

SEQ ID NO: 361 - DNA, 2670 bp, synthetic construct
  misc_feature 1..2670: note = Variant of RNA polymerase
  source 1..2670: mol_type = other DNA
atgcaccatcaccatcaccatatgaacacgattaacatcgctaagaacgacttctctgacatcgaactggctgctatcccgttcaacactctggctgaccattacggtgagggtttagctcgcgaacagttggcccttgagcatgagtcttacgagatgggtgaagcacgtttccgcaagatgtttgagcgtcaacttaaagctggtgaggttgcggataacgctgccgccaagcctctcatcactaccctactccctaagatgattgcacgcatcaacgactggtttgaggaagtgaaagctaagcgcggcaagcgcccgacagccttccagttcctgcaagaaatcaagccggaagccgtagcgtacatcaccattaagaccactctggcttgcctaaccagtgcggaccgtacaaccgttcaggctgtagcaagcgcaatcggtcgggccattgaggacgaggctcgcttcggtcgtatccgtgaccttgaagctaagcacttcaagaaaaactatgaggaacaactcaacaagcgcgtagggcacgtctacaagaaagcatttatgcaagttgtcgaggctgacatgctctctaagggtctactcggtggcgaggcgtggtcttcgtggcataaggaagactctattcatgtaggagtacgctgcatcgagatgctcattgagtcaaccggaatggttagcttacaccgccaaaatgctggcgtagtaggtcaagactctgagactatcgaactcgcacctgaatacgctgaggctatcgcaacccgtgcaggtgcgctggctggcatctctccgatgttccaaccttgcgtagttcctcctaagccgtggactggcattactggtggtggctattgggctaacggtcgtcgtcctctggcgctggtgcgtactcacagtaagaaaggtctgatgcgctacgaagacgtttacatgcctgaggtgtacaaagcgattaacattgcgcaaaacaccgcctggtcgatcaacaagtgggtcctggcggtcgccaacgtaatcaccaagtggaagcattgtccggtccgggacatccctgcgattgagcgtgaagaactcccgatgaaaccggaagacatcgacatgaatcctgaggctctcaccgcgtggaaacgtgctaaagctgctgtgtaccgcagagacaaggctcgcaagtctcgccgtatcttgcttgagttcatgcttgagcaagccaataagtttgctaaccataaggccatctggttcccttacaacatggactggcgcggtcgtgtttacgctgtgtcgatgttcaacccgcaaggtaacgatatgaccaaaggactgcttacgctggcgaaaggtaaaccaatcggtaaggaaggttactactggctgaaaatccacggtgcaaactgtgcgggtgtcgataaggttccgttccctgagcgcatcaagttcattgaggaaaaccacgagaacatcatggcttgcgctaagtctccactggagaacacttggtgggctgagcaagatagtccgttctgcttccttgcgttctgctttgagtacgctggggtacagcaccacggcctgagctataactgctcccttccgctggcgtttgacgggtcttgctctggcatccagcacttctccgcgatgctccgagatgaggtaggtggtcgcgcggttaacttgcttcctagtgaaaccgttcaggacatctacgggattgttgctaagaaagtcaacgagattctacaagcagacgcaatcaatgggaccgataacgaagtagttaccgtgaccgatgagaacccgggtgaaatctctgagaaagtcaagctgggcactaaggcactggctggtcaatggctggcttacggtgttactcgcagtgtgactaagcgttcagtcatgacgctggcttacgggtccaaagagttcggcttccgtcaacaagtgctgcgccacactattcagtgggctattgattccggcaagggtctgatgttcactcagccgaatcaggctgctggatacatggctaagctgatttgggaatctgtgagcgtgacggtggtagctgcggttgaagcaatgaactggcttaagtctgctgctaagctgctggctgctgaggtcaaagatgccaaaactggagagattcttcgcaagcgttgcgctgtgcattgggtaactcctgatggtttccctgtgtggcaggaatacaagaagcctattcagacgcgcttgaacctgatgttcctcggtcagttccgcttacagcctaccattaacaccaacaaagatagcgagattgatgcacgtaaacaggagtctggtatcgctcctaactttgtacacagccaagacggtagccaccttcgtaagactgtagtgtgggcacacgagaagtacggaatcgaatcttttgcactgattcacgactccttcggtaccattccggctgacgctgcgaacctgttcaaagcagtgcgcgaaactatggttgacacatatgagtcttgtgatgtactggctgatttctacgaccagttcgctgaccagttgcacgagtctcaattggacaaaatgccagcacttccggctaaaggtaacttgaacctccgtgacatcttagagtcggacttcgcgttcgcg

SEQ ID NO: 362 - protein, 890 aa, synthetic construct
  REGION 1..890: note = Variant of RNA polymerase
MHHHHHHMNTINIAKNDFSDIELAAIPFNTLADHYGEGLAREQLALEHESYEMGEARFRKMFERQLKAGEVADNAAAKPLITTLLPKMIARINDWFEEVKAKRGKRPTAFQFLQEIKPEAVAYITIKTTLACLTSADRTTVQAVASAIGRAIEDEARFGRIRDLEAKHFKKNYEEQLNKRVGHVYKKAFMQVVEADMLSKGLLGGEAWSSWHKEDSIHVGVRCIEMLIESTGMVSLHRQNAGVVGQDSETIELAPEYAEAIATRAGALAGISPMFQPCVVPPKPWTGITGGGYWANGRRPLALVRTHSKKGLMRYEDVYMPEVYKAINIAQNTAWSINKWVLAVANVITKWKHCPVRDIPAIEREELPMKPEDIDMNPEALTAWKRAKAAVYRRDKARKSRRILLEFMLEQANKFANHKAIWFPYNMDWRGRVYAVSMFNPQGNDMTKGLLTLAKGKPIGKEGYYWLKIHGANCAGVDKVPFPERIKFIEENHENIMACAKSPLENTWWAEQDSPFCFLAFCFEYAGVQHHGLSYNCSLPLAFDGSCSGIQHFSAMLRDEVGGRAVNLLPSETVQDIYGIVAKKVNEILQADAINGTDNEVVTVTDENPGEISEKVKLGTKALAGQWLAYGVTRSVTKRSVMTLAYGSKEFGFRQQVLRHTIQWAIDSGKGLMFTQPNQAAGYMAKLIWESVSVTVVAAVEAMNWLKSAAKLLAAEVKDAKTGEILRKRCAVHWVTPDGFPVWQEYKKPIQTRLNLMFLGQFRLQPTINTNKDSEIDARKQESGIAPNFVHSQDGSHLRKTVVWAHEKYGIESFALIHDSFGTIPADAANLFKAVRETMVDTYESCDVLADFYDQFADQLHESQLDKMPALPAKGNLNLRDILESDFAFA

SEQ ID NO: 363 - DNA, 2670 bp, synthetic construct
  misc_feature 1..2670: note = Variant of RNA polymerase
  source 1..2670: mol_type = other DNA
atgcaccatcaccatcaccatatgaacacgattaacatcgctaagaacgacttctctgacatcgaactggctgctatcccgttcaacactctggctgaccattacggtgagggtttagctcgcgaacagttggcccttgagcatgagtcttacgagatgggtgaagcacgtttccgcaagatgtttgagcgtcaacttaaagctggtgaggttgcggataacgctgccgccaagcctctcatcactaccctactccctaagatgattgcacgcatcaacgactggtttgaggaagtgaaagctaagcgcggcaagcgcccgacagccttccagttcctgcaagaaatcaagccggaagccgtagcgtacatcaccattaagaccactctggcttgcctaaccagtgcggaccgtacaaccgttcaggctgtagcaagcgcaatcggtcgggccattgaggacgaggctcgcttcggtcgtatccgtgaccttgaagctaagcacttcaagaaaaactatgaggaacaactcaacaagcgcgtagggcacgtcctgaagctggcatttatgcaagttgtcgaggctgacatgctctctaagggtctactcggtggcgaggcgtggtcttcgtggcataaggaagactctattcatgtaggagtacgctgcatcgagatgctcattgagtcaaccggaatggttagcttacaccgccaaaatgctggcgtagtaggtcaagactctgagactatcgaactcgcacctgaatacgctgaggctatcgcaacccgtgcaggtgcgctggctggcatctctccgatgttccaaccttgcgtagttcctcctaagccgtggactggcattactggtggtggctattgggctaacggtcgtcgtcctctggcgctggtgcgtactcacagtaagaaaggtctgatgcgctacgaagacgtttacatgcctgaggtgtacaaagcgattaacattgcgcaaaacaccgcctggtcgatcaacaagtgggtcctggcggtcgccaacgtaatcaccaagtggaagcattgtccggtccgggacatccctgcgattgagcgtgaagaactcccgatgaaaccggaagacatcgacatgaatcctgaggctctcaccgcgtggaaacgtgctaaagctgctgtgtaccgcagagacaaggctcgcaagtctcgccgtatcttgcttgagttcatgcttgagcaagccaataagtttgctaaccataaggccatctggttcccttacaacatggactggcgcggtcgtgtttacgctgtgccgatgttcaacccgcaaggtaacgatatgaccaaaggactgcttacgctggcgaaaggtaaaccaatcggtaaggaaggttactactggctgaaaatccacggtgcaaactgtgcgggtgtcgataaggttccgttccctgagcgcatcaagttcattgaggaaaaccacgagaacatcatggcttgcgctaagtctccactggagaacacttggtgggctgagcaagatagtccgttctgcttccttgcgttctgctttgagtacgctggggtacagcaccacggcctgagctataactgctcccttccgctggcgtttgacgggtcttgctctggcatccagcacttctccgcgatgctccgagatgaggtaggtggtcgcgcggttaacttgcttcctagtgaaaccgttcaggacatctacgggattgttgctaagaaagtcaacgagattctacaagcagacgcaatcaatgggaccgataacgaagtagttaccgtgaccgatgagaacccgggtgaaatctctgagaaagtcaagctgggcactaaggcactggctggtcaatggctggcttacggtgttactcgcagtgtgactaagcgttcagtcatgacgctggcttacgggtccaaagagttcggcttccgtcaacaagtgctgcgccacactattcagtgggctattgattccggcaagggtctgatgttcactcagccgaatcaggctgctggatacatggctaagctgatttgggaatctgtgagcgtgacggtggtagctgcggttgaagcaatgaactggcttaagtctgctgctaagctgctggctgctgaggtcaaagataagaagactggagagattcttcgcaagcgttgcgctgtgcattgggtaactcctgatggtttccctgtgtggcaggaatacaagaagcctattcagacgcgcttgaacctgatgttcctcggtcagttccgcttacagcctaccattaacaccaacaaagatagcgagattgatgcacgtaaacaggagtctggtatcgctcctaactttgtacacagccaagacggtagccaccttcgtaagactgtagtgtgggcacacgagaagtacggaatcgaatcttttgcactgattcacgactccttcggtaccattccggctgacgctgcgaacctgttcaaagcagtgcgcgaaactatggttgacacatatgagtcttgtgatgtactggctgatttctacgaccagttcgctgaccagttgcacgagtctcaattggacaaaatgccagcacttccggctaaaggtaacttgaacctccgtgacatcttagagtcggacttcgcgttcgcg

SEQ ID NO: 364 - protein, 890 aa, synthetic construct
  REGION 1..890: note = Variant of RNA polymerase
MHHHHHHMNTINIAKNDFSDIELAAIPFNTLADHYGEGLAREQLALEHESYEMGEARFRKMFERQLKAGEVADNAAAKPLITTLLPKMIARINDWFEEVKAKRGKRPTAFQFLQEIKPEAVAYITIKTTLACLTSADRTTVQAVASAIGRAIEDEARFGRIRDLEAKHFKKNYEEQLNKRVGHVLKLAFMQVVEADMLSKGLLGGEAWSSWHKEDSIHVGVRCIEMLIESTGMVSLHRQNAGVVGQDSETIELAPEYAEAIATRAGALAGISPMFQPCVVPPKPWTGITGGGYWANGRRPLALVRTHSKKGLMRYEDVYMPEVYKAINIAQNTAWSINKWVLAVANVITKWKHCPVRDIPAIEREELPMKPEDIDMNPEALTAWKRAKAAVYRRDKARKSRRILLEFMLEQANKFANHKAIWFPYNMDWRGRVYAVPMFNPQGNDMTKGLLTLAKGKPIGKEGYYWLKIHGANCAGVDKVPFPERIKFIEENHENIMACAKSPLENTWWAEQDSPFCFLAFCFEYAGVQHHGLSYNCSLPLAFDGSCSGIQHFSAMLRDEVGGRAVNLLPSETVQDIYGIVAKKVNEILQADAINGTDNEVVTVTDENPGEISEKVKLGTKALAGQWLAYGVTRSVTKRSVMTLAYGSKEFGFRQQVLRHTIQWAIDSGKGLMFTQPNQAAGYMAKLIWESVSVTVVAAVEAMNWLKSAAKLLAAEVKDKKTGEILRKRCAVHWVTPDGFPVWQEYKKPIQTRLNLMFLGQFRLQPTINTNKDSEIDARKQESGIAPNFVHSQDGSHLRKTVVWAHEKYGIESFALIHDSFGTIPADAANLFKAVRETMVDTYESCDVLADFYDQFADQLHESQLDKMPALPAKGNLNLRDILESDFAFA

SEQ ID NO: 365 - DNA, 2670 bp, synthetic construct
  misc_feature 1..2670: note = Variant of RNA polymerase
  source 1..2670: mol_type = other DNA
atgcaccatcaccatcaccatatgaacacgattaacatcgctaagaacgacttctctgacatcgaactggctgctatcccgttcaacactctggctgaccattacggtgagggcttagctcgcgaacagttggcccttgagcatgagtcttacgagatgggtgaagcacgtttccgcaagatgtttgagcgtcaacttaaagctggtgaggttgcggataacgctgccgccaagcctctcatcactaccctactccctaagatgattgcacgcatcaacgactggtttgaggaagtgaaagctaagcgcggcaagcgcccgacagccttccagttcctgcaagaaatcaagccggaagccgtagcgtacatcaccattaagaccactctggcttgcctaaccagtgcggaccgtacaaccgttcaggctgtagcaagcgcaatcggtcgggccattgaggacgaggctcgcttcggtcgtatccgtgaccttgaagctaagcacttcaagaaaaactatgaggaacaactcaacaagcgcgtagggcacgtcctgaagctggcatttatgcaagttgtcgaggctgacatgctctctaagggtctactcggtggcgaggcgtggtcttcgtggcataaggaagactctattcatgtaggagtacgctgcatcgagatgctcattgagtcaaccggaatggttagcttacaccgccaaaatgctggcgtagtaggtcaagactctgagactatcgaactcgcacctgaatacgctgaggctatcgcaacccgtgcaggtgcgctggctggcatctctccgatgttccaaccttgcgtagttcctcctaagccgtggactggcattactggtggtggctattgggctaacggtcgtcgtcctctggcgctggtgcgtactcacagtaagaaaggtctgatgcgctacgaagacgtttacatgcctgaggtgtacaaagcgattaacattgcgcaaaacaccgcctggtcgatcaacaagtgggtcctggcggtcgccaacgtaatcaccaagtggaagcattgtccggtccgggacatccctgcgattgagcgtgaagaactcccgatgaaaccggaagacatcgacatgaatcctgaggctctcaccgcgtggaaacgtgctaaagctgctgtgtaccgcagagacaaggctcgcaagtctcgccgtatcttgcttgagttcatgcttgagcaagccaataagtttgctaaccataaggccatctggttcccttacaacatggactggcgcggtcgtgtttacgctgtgtcgatgttcaacccgcaaggtaacgatatgaccaaaggactgcttacgctggcgaaaggtaaaccaatcggtaaggaaggttactactggctgaaaatccacggtgcaaactgtgcgggtgtcgataaggttccgttccctgagcgcatcaagttcattgaggaaaaccacgagaacatcatggcttgcgctaagtctccactggagaacacttggtgggctgagcaagatagtccgttctgcttccttgcgttctgctttgagtacgctggggtacagcaccacggcctgagctataactgctcccttccgctggcgtttgacgggtcttgctctggcatccagcacttctccgcgatgctccgagatgaggtaggtggtcgcgcggttaacttgcttcctagtgaaaccgttcaggacatctacgggattgttgctaagaaagtcaacgagattctacaagcagacgcaatcaatgggaccgataacgaagtagttaccgtgaccgatgagaacactggtgaaatctctgagaaagtcaagctgggcactaaggcactggctggtcaatggctggcttacggtgttactcgcagtgtgactaagcgttcagtcatgacgctggcttacgggtccaaagagttcggcttccgtcaacaagtgctgcgccacactattcagtgggctattgattccggcaagggtctgatgttcactcagccgaatcaggctgctggatacatggctaagctgatttgggaatctgtgagcgtgacggtggtagctgcggttgaagcaatgaactggcttaagtctgctgctaagctgctggctgctgaggtcaaagataagaaaactggagagattcttcgcaagcgttgcgctgtgcattgggtaactcctgatggtttccctgtgtggcaggaatacaagaagcctattcagacgcgcttgaacctgatgttcctcggtcagttccgcttacagcctaccattaacaccaacaaagatagcgagattgatgcacgtaaacaggagtctggtatcgctcctaactttgtacacagccaagacggtagccaccttcgtaagactgtagtgtgggcacacgagaagtacggaatcgaatcttttgcactgattcacgactccttcggtaccattccggctgacgctgcgaacctgttcaaagcagtgcgcgaaactatggttgacacatatgagtcttgtgatgtactggctgatttctacgaccagttcgctgaccagttgcacgagtctcaattggacaaaatgccagcacttccggctaaaggtaacttgaacctccgtgacatcttagagtcggacttcgcgttcgcg

SEQ ID NO: 366 - protein, 890 aa, synthetic construct
  REGION 1..890: note = Variant of RNA polymerase
MHHHHHHMNTINIAKNDFSDIELAAIPFNTLADHYGEGLAREQLALEHESYEMGEARFRKMFERQLKAGEVADNAAAKPLITTLLPKMIARINDWFEEVKAKRGKRPTAFQFLQEIKPEAVAYITIKTTLACLTSADRTTVQAVASAIGRAIEDEARFGRIRDLEAKHFKKNYEEQLNKRVGHVLKLAFMQVVEADMLSKGLLGGEAWSSWHKEDSIHVGVRCIEMLIESTGMVSLHRQNAGVVGQDSETIELAPEYAEAIATRAGALAGISPMFQPCVVPPKPWTGITGGGYWANGRRPLALVRTHSKKGLMRYEDVYMPEVYKAINIAQNTAWSINKWVLAVANVITKWKHCPVRDIPAIEREELPMKPEDIDMNPEALTAWKRAKAAVYRRDKARKSRRILLEFMLEQANKFANHKAIWFPYNMDWRGRVYAVSMFNPQGNDMTKGLLTLAKGKPIGKEGYYWLKIHGANCAGVDKVPFPERIKFIEENHENIMACAKSPLENTWWAEQDSPFCFLAFCFEYAGVQHHGLSYNCSLPLAFDGSCSGIQHFSAMLRDEVGGRAVNLLPSETVQDIYGIVAKKVNEILQADAINGTDNEVVTVTDENTGEISEKVKLGTKALAGQWLAYGVTRSVTKRSVMTLAYGSKEFGFRQQVLRHTIQWAIDSGKGLMFTQPNQAAGYMAKLIWESVSVTVVAAVEAMNWLKSAAKLLAAEVKDKKTGEILRKRCAVHWVTPDGFPVWQEYKKPIQTRLNLMFLGQFRLQPTINTNKDSEIDARKQESGIAPNFVHSQDGSHLRKTVVWAHEKYGIESFALIHDSFGTIPADAANLFKAVRETMVDTYESCDVLADFYDQFADQLHESQLDKMPALPAKGNLNLRDILESDFAFA

SEQ ID NO: 367 - DNA, 2670 bp, synthetic construct
  misc_feature 1..2670: note = Variant of RNA polymerase
  source 1..2670: mol_type = other DNA
atgcaccatcaccatcaccatatgaacacgattaacatcgctaagaacgacttctctgacatcgaactggctgctatcccgttcaacactctggctgaccattacggtgagggtttagctcgcgaacagttggcccttgagcatgagtcttacgagatgggtgaagcacgtttccgcaagatgtttgagcgtcaacttaaagctggtgaggttgcggataacgctgccgccaagcctctcatcactaccctactccctaagatgattgcacgcatcaacgactggtttgaggaagtgaaagctaagcgcggcaagcgcccgacagccttccagttcctgcaagaaatcaagccggaagccgtagcgtacatcaccattaagaccactctggcttgcctaaccagtgcggaccgtacaaccgttcaggctgtagcaagcgcaatcggtcgggccattgaggacgaggctcgcttcggtcgtatccgtgaccttgaagctaagcacttcaagaaaaactatgaggaacaactcaacaagcgcgtagggcacgtcctgaagcacgcatttatgcaagttgtcgaggctgacatgctctctaagggtctactcggtggcgaggcgtggtcttcgtggcataaggaagactctattcatgtaggagtacgctgcatcgagatgctcattgagtcaaccggaatggttagcttacaccgccaaaatgctggcgtagtaggtcaagactctgagactatcgaactcgcacctgaatacgctgaggctatcgcaacccgtgcaggtgcgctggctggcatctctccgatgttccaaccttgcgtagttcctcctaagccgtggactggcattactggtggtggctattgggctaacggtcgtcgtcctctggcgctggtgcgtactcacagtaagaaaggtctgatgcgctacgaagacgtttacatgcctgaggtgtacaaagcgattaacattgcgcaaaacaccgcctggtcgatcaacaagtgggtcctggcggtcgccaacgtaatcaccaagtggaagcattgtccggtccgggacatccctgcgattgagcgtgaagaactcccgatgaaaccggaagacatcgacatgaatcctgaggctctcaccgcgtggaaacgtgctaaagctgctgtgtaccgcagagacaaggctcgcaagtctcgccgtatcttgcttgagttcatgcttgagcaagccaataagtttgctaaccataaggccatctggttcccttacaacatggactggcgcggtcgtgtttacgctgtgtcgatgttcaacccgcaaggtaacgatatgaccaaaggactgcttacgctggcgaaaggtaaaccaatcggtaaggaaggttactactggctgaaaatccacggtgcaaactgtgcgggtgtcgataaggttccgttccctgagcgcatcaagttcattgaggaaaaccacgagaacatcatggcttgcgctaagtctccactggagaacacttggtgggctgagcaagatagtccgttctgcttccttgcgttctgctttgagtacgctggggtacagcaccacggcctgagctataactgctcccttccgctggcgtttgacgggtcttgctctggcatccagcacttctccgcgatgctccgagatgaggtaggtggtcgcgcggttaacttgcttcctagtgaaaccgttcaggacatctacgggattgttgctaagaaagtcaacgagattctacaagcagacgcaatcaatgggaccgataacgaagtagttaccgtgaccgatgagaacacgggtgaaatctctgagaaagtcaagctgggcactaaggcactggctggtcaatggctggcttacggtgttactcgcagtgtgactaagcgttcagtcatgacgctggcttacgggtccaaagagttcggcttccgtcaacaagtgctgcgccacactattcagtgggctattgattccggcaagggtctgatgttcactcagccgaatcaggctgctggatacatggctaagctgatttgggaatctgtgagcgtgacggtggtagctgcggttgaagcaatgaactggcttaagtctgctgctaagctgctggctgctgaggtcaaagataagaagactggagagattcttcgcaagcgttgcgctgtgcattgggtaactcctgatggtttccctgtgtggcaggaatacaagaagcctattcagacgcgcttgaacctgatgttcctcggtcagttccgcttacagcctaccattaacaccaacaaagatagcgagattgatgcacgtaaacaggagtctggtatcgctcctaactttgtacacagccaagacggtagccaccttcgtaagactgtagtgtgggcacacgagaagtacggaatcgaatcttttgcactgattcacgactccttcggtaccattccggctgacgctgcgaacctgttcaaagcagtgcgcgaaactatggttgacacatatgagtcttgtgatgtactggctgatttctacgaccagttcgctgaccagttgcacgagtctcaattggacaaaatgccagcacttccggctaaaggtaacttgaacctccgtgacatcttagagtcggacttcgcgttcgcg

SEQ ID NO: 368 - protein, 890 aa, synthetic construct
  REGION 1..890: note = Variant of RNA polymerase
MHHHHHHMNTINIAKNDFSDIELAAIPFNTLADHYGEGLAREQLALEHESYEMGEARFRKMFERQLKAGEVADNAAAKPLITTLLPKMIARINDWFEEVKAKRGKRPTAFQFLQEIKPEAVAYITIKTTLACLTSADRTTVQAVASAIGRAIEDEARFGRIRDLEAKHFKKNYEEQLNKRVGHVLKHAFMQVVEADMLSKGLLGGEAWSSWHKEDSIHVGVRCIEMLIESTGMVSLHRQNAGVVGQDSETIELAPEYAEAIATRAGALAGISPMFQPCVVPPKPWTGITGGGYWANGRRPLALVRTHSKKGLMRYEDVYMPEVYKAINIAQNTAWSINKWVLAVANVITKWKHCPVRDIPAIEREELPMKPEDIDMNPEALTAWKRAKAAVYRRDKARKSRRILLEFMLEQANKFANHKAIWFPYNMDWRGRVYAVSMFNPQGNDMTKGLLTLAKGKPIGKEGYYWLKIHGANCAGVDKVPFPERIKFIEENHENIMACAKSPLENTWWAEQDSPFCFLAFCFEYAGVQHHGLSYNCSLPLAFDGSCSGIQHFSAMLRDEVGGRAVNLLPSETVQDIYGIVAKKVNEILQADAINGTDNEVVTVTDENTGEISEKVKLGTKALAGQWLAYGVTRSVTKRSVMTLAYGSKEFGFRQQVLRHTIQWAIDSGKGLMFTQPNQAAGYMAKLIWESVSVTVVAAVEAMNWLKSAAKLLAAEVKDKKTGEILRKRCAVHWVTPDGFPVWQEYKKPIQTRLNLMFLGQFRLQPTINTNKDSEIDARKQESGIAPNFVHSQDGSHLRKTVVWAHEKYGIESFALIHDSFGTIPADAANLFKAVRETMVDTYESCDVLADFYDQFADQLHESQLDKMPALPAKGNLNLRDILESDFAFA

SEQ ID NO: 369 - DNA, 2670 bp, synthetic construct
  misc_feature 1..2670: note = Variant of RNA polymerase
  source 1..2670: mol_type = other DNA
atgcaccatcaccatcaccatatgaacacgattaacatcgctaagaacgacttctctgacatcgaactggctgctatcccgttcaacactctggctgaccattacggtgagggtttagctcgcgaacagttggcccttgagcatgagtcttacgagatgggtgaagcacgtttccgcaagatgtttgagcgtcaacttaaagctggtgaggttgcggataacgctgccgccaagcctctcatcactaccctactccctaagatgattgcacgcatcaacgactggtttgaggaagtgaaagctaagcgcggcaagcgcccgacagccttccagttcctgcaagaaatcaagccggaagccgtagcgtacatcaccattaagaccactctggcttgcctaaccagtgcggaccgtacaaccgttcaggctgtagcaagcgcaatcggtcgggccattgaggacgaggctcgcttcggtcgtatccgtgaccttgaagctaagcacttcaagaaaaactatgaggaacaactcaacaagcgcgtagggcacgtctacaagaaagcatttatgcaagttgtcgaggctgacatgctctctaagggtctactcggtggcgaggcgtggtcttcgtggcataaggaagactctattcatgtaggagtacgctgcatcgagatgctcattgagtcaaccggaatggttagcttacaccgccaaaatgctggcgtagtaggtcaagactctgagactatcgaactcgcacctgaatacgctgaggctatcgcaacccgtgcaggtgcgctggctggcatctctccgatgttccaaccttgcgtagttcctcctaagccgtggactggcattactggtggtggctattgggctaacggtcgtcgtcctctggcgctggtgcgtactcacagtaagaaaggtctgatgcgctacgaagacgtttacatgcctgaggtgtacaaagcgattaacattgcgcaaaacaccgcctggtcgatcaacaagtgggtcctggcggtcgccaacgtaatcaccaagtggaagcattgtccggtccgggacatccctgcgattgagcgtgaagaactcccgatgaaaccggaagacatcgacatgaatcctgaggctctcaccgcgtggaaacgtgctaaagctgctgtgtaccgcagagacaaggctcgcaagtctcgccgtatcttgcttgagttcatgcttgagcaagccaataagtttgctaaccataaggccatctggttcccttacaacatggactggcgcggtcgtgtttacgctgtgtcgatgttcaacccgcaaggtaacgatatgaccaaaggactgcttacgctggcgaaaggtaaaccaatcggtaaggaaggttactactggctgaaaatccacggtgcaaactgtgcgggtgtcgataaggttccgttccctgagcgcatcaagttcattgaggaaaaccacgagaacatcatggcttgcgctaagtctccactggagaacacttggtgggctgagcaagatagtccgttctgcttccttgcgttctgctttgagtacgctggggtacagcaccacggcctgagctataactgctcccttccgctggcgtttgacgggtcttgctctggcatccagcacttctccgcgatgctccgagatgaggtaggtggtcgcgcggttaacttgcttcctagtgaaaccgttcaggacatctacgggattgttgctaagaaagtcaacgagattctacaagcagacgcaatcaatgggaccgataacgaagtagttaccgtgaccgatgagaacccgggtgaaatctctgagaaagtcaagctgggcactaaggcactggctggtcaatggctggcttacggtgttactcgcagtgtgactaagcgttcagtcatgacgctggcttacgggtccaaagagttcggcttccgtcaacaagtgctgcgccacactattcagtgggctattgattccggcaagggtctgatgttcactcagccgaatcaggctgctggatacatggctaagctgatttgggaatctgtgagcgtgacggtggtagctgcggttgaagcaatgaactggcttaagtctgctgctaagctgctggctgctgaggtcaaagataagaagactggagagattcttcgcaagcgttgcgctgtgcattgggtaactcctgatggtttccctgtgtggcaggaatacaagaagcctattcagacgcgcttgaacctgatgttcctcggtcagttccgcttacagcctaccattaacaccaacaaagatagcgagattgatgcacgtaaacaggagtctggtatcgctcctaactttgtacacagccaagacggtagccaccttcgtaagactgtagtgtgggcacacgagaagtacggaatcgaatcttttgcactgattcacgactccttcggtaccattccggctgacgctgcgaacctgttcaaagcagtgcgcgaaactatggttgacacatatgagtcttgtgatgtactggctgatttctacgaccagttcgctgaccagttgcacgagtctcaattggacaaaatgccagcacttccggctaaaggtaacttgaacctccgtgacatcttagagtcggacttcgcgttcgcg

SEQ ID NO: 370 - protein, 890 aa, synthetic construct
  REGION 1..890: note = Variant of RNA polymerase
MHHHHHHMNTINIAKNDFSDIELAAIPFNTLADHYGEGLAREQLALEHESYEMGEARFRKMFERQLKAGEVADNAAAKPLITTLLPKMIARINDWFEEVKAKRGKRPTAFQFLQEIKPEAVAYITIKTTLACLTSADRTTVQAVASAIGRAIEDEARFGRIRDLEAKHFKKNYEEQLNKRVGHVYKKAFMQVVEADMLSKGLLGGEAWSSWHKEDSIHVGVRCIEMLIESTGMVSLHRQNAGVVGQDSETIELAPEYAEAIATRAGALAGISPMFQPCVVPPKPWTGITGGGYWANGRRPLALVRTHSKKGLMRYEDVYMPEVYKAINIAQNTAWSINKWVLAVANVITKWKHCPVRDIPAIEREELPMKPEDIDMNPEALTAWKRAKAAVYRRDKARKSRRILLEFMLEQANKFANHKAIWFPYNMDWRGRVYAVSMFNPQGNDMTKGLLTLAKGKPIGKEGYYWLKIHGANCAGVDKVPFPERIKFIEENHENIMACAKSPLENTWWAEQDSPFCFLAFCFEYAGVQHHGLSYNCSLPLAFDGSCSGIQHFSAMLRDEVGGRAVNLLPSETVQDIYGIVAKKVNEILQADAINGTDNEVVTVTDENPGEISEKVKLGTKALAGQWLAYGVTRSVTKRSVMTLAYGSKEFGFRQQVLRHTIQWAIDSGKGLMFTQPNQAAGYMAKLIWESVSVTVVAAVEAMNWLKSAAKLLAAEVKDKKTGEILRKRCAVHWVTPDGFPVWQEYKKPIQTRLNLMFLGQFRLQPTINTNKDSEIDARKQESGIAPNFVHSQDGSHLRKTVVWAHEKYGIESFALIHDSFGTIPADAANLFKAVRETMVDTYESCDVLADFYDQFADQLHESQLDKMPALPAKGNLNLRDILESDFAFA

SEQ ID NO: 371 - DNA, 2670 bp, synthetic construct
  misc_feature 1..2670: note = Variant of RNA polymerase
  source 1..2670: mol_type = other DNA
atgcaccatcaccatcaccatatgaacacgattaacatcgctaagaacgacttctctgacatcgaactggctgctatcccgttcaacactctggctgaccattacggtgagggtttagctcgcgaacagttggcccttgagcatgagtcttacgagatgggtgaagcacgtttccgcaagatgtttgagcgtcaacttaaagctggtgaggttgcggataacgctgccgccaagcctctcatcactaccctactccctaagatgattgcacgcatcaacgactggtttgaggaagtgaaagctaagcgcggcaagcgcccgacagccttccagttcctgcaagaaatcaagccggaagccgtagcgtacatcaccattaagaccactctggcttgcctaaccagtgcggaccgtacaaccgttcaggctgtagcaagcgcaatcggtcgggccattgaggacgaggctcgcttcggtcgtatccgtgaccttgaagctaagcacttcaagaaaaactatgaggaacaactcaacaagcgcgtagggcacgtctacaagaaagcatttatgcaagttgtcgaggctgacatgctctctaagggtctactcggtggcgaggcgtggtcttcgtggcataaggaagactctattcatgtaggagtacgctgcatcgagatgctcattgagtcaaccggaatggttagcttacaccgccaaaatgctggcgtagtaggtcaagactctgagactatcgaactcgcacctgaatacgctgaggctatcgcaacccgtgcaggtgcgctggctggcatctctccgatgttccaaccttgcgtagttcctcctaagccgtggactggcattactggtggtggctattgggctaacggtcgtcgtcctctggcgctggtgcgtactcacagtaagaaaggtctgatgcgctacgaagacgtttacatgcctgaggtgtacaaagcgattaacattgcgcaaaacaccgcctggtcgatcaacaagtgggtcctggcggtcgccaacgtaatcaccaagtggaagcattgtccggtccgggacatccctgcgattgagcgtgaagaactcccgatgaaaccggaagacatcgacatgaatcctgaggctctcaccgcgtggaaacgtgctaaagctgctgtgtaccgcagagacaaggctcgcaagtctcgccgtatcttgcttgagttcatgcttgagcaagccaataagtttgctaaccataaggccatctggttcccttacaacatggactggcgcggtcgtgtttacgctgtgtcgatgttcaacccgcaaggtaacgatatgaccaaaggactgcttacgctggcgaaaggtaaaccaatcggtaaggaaggttactactggctgaaaatccacggtgcaaactgtgcgggtgtcgataaggttccgttccctgagcgcatcaagttcattgaggaaaaccacgagaacatcatggcttgcgctaagtctccactggagaacacttggtgggctgagcaagatagtccgttctgcttccttgcgttctgctttgagtacgctggggtacagcaccacggcctgagctataactgctcccttccgctggcgtttgacgggtcttgctctggcatccagcacttctccgcgatgctccgagatgaggtaggtggtcgcgcggttaacttgcttcctagtgaaaccgttcaggacatctacgggattgttgctaagaaagtcaacgagattctacaagcagacgcaatcaatgggaccgataacgaagtagttaccgtgaccgatgagaacactggtgaaatctctgagaaagtcaagctgggcactaaggcactggctggtcaatggctggcttacggtgttactcgcagtgtgactaagcgttcagtcatgacgctggcttacgggtccaaagagttcggcttccgtcaacaagtgctgcgccacactattcagtgggctattgattccggcaagggtctgatgttcactcagccgaatcaggctgctggatacatggctaagctgatttgggaatctgtgagcgtgacggtggtagctgcggttgaagcaatgaactggcttaagtctgctgctaagctgctggctgctgaggtcaaagataagagcactggagagattcttcgcaagcgttgcgctgtgcattgggtaactcctgatggtttccctgtgtggcaggaatacaagaagcctattcagacgcgcttgaacctgatgttcctcggtcagttccgcttacagcctaccattaacaccaacaaagatagcgagattgatgcacgtaaacaggagtctggtatcgctcctaactttgtacacagccaagacggtagccaccttcgtaagactgtagtgtgggcacacgagaagtacggaatcgaatcttttgcactgattcacgactccttcggtaccattccggctgacgctgcgaacctgttcaaagcagtgcgcgaaactatggttgacacatatgagtcttgtgatgtactggctgatttctacgaccagttcgctgaccagttgcacgagtctcaattggacaaaatgccagcacttccggctaaaggtaacttgaacctccgtgacatcttagagtcggacttcgcgttcgcg

SEQ ID NO: 372 - protein, 890 aa, synthetic construct
  REGION 1..890: note = Variant of RNA polymerase
MHHHHHHMNTINIAKNDFSDIELAAIPFNTLADHYGEGLAREQLALEHESYEMGEARFRKMFERQLKAGEVADNAAAKPLITTLLPKMIARINDWFEEVKAKRGKRPTAFQFLQEIKPEAVAYITIKTTLACLTSADRTTVQAVASAIGRAIEDEARFGRIRDLEAKHFKKNYEEQLNKRVGHVYKKAFMQVVEADMLSKGLLGGEAWSSWHKEDSIHVGVRCIEMLIESTGMVSLHRQNAGVVGQDSETIELAPEYAEAIATRAGALAGISPMFQPCVVPPKPWTGITGGGYWANGRRPLALVRTHSKKGLMRYEDVYMPEVYKAINIAQNTAWSINKWVLAVANVITKWKHCPVRDIPAIEREELPMKPEDIDMNPEALTAWKRAKAAVYRRDKARKSRRILLEFMLEQANKFANHKAIWFPYNMDWRGRVYAVSMFNPQGNDMTKGLLTLAKGKPIGKEGYYWLKIHGANCAGVDKVPFPERIKFIEENHENIMACAKSPLENTWWAEQDSPFCFLAFCFEYAGVQHHGLSYNCSLPLAFDGSCSGIQHFSAMLRDEVGGRAVNLLPSETVQDIYGIVAKKVNEILQADAINGTDNEVVTVTDENTGEISEKVKLGTKALAGQWLAYGVTRSVTKRSVMTLAYGSKEFGFRQQVLRHTIQWAIDSGKGLMFTQPNQAAGYMAKLIWESVSVTVVAAVEAMNWLKSAAKLLAAEVKDKSTGEILRKRCAVHWVTPDGFPVWQEYKKPIQTRLNLMFLGQFRLQPTINTNKDSEIDARKQESGIAPNFVHSQDGSHLRKTVVWAHEKYGIESFALIHDSFGTIPADAANLFKAVRETMVDTYESCDVLADFYDQFADQLHESQLDKMPALPAKGNLNLRDILESDFAFA

SEQ ID NO: 373 - DNA, 2670 bp, synthetic construct
  misc_feature 1..2670: note = Variant of RNA polymerase
  source 1..2670: mol_type = other DNA
atgcaccatcaccatcaccatatgaacacgattaacatcgctaagaacgacttctctgacatcgaactggctgctatcccgttcaacactctggctgaccattacggtgagggtttagctcgcgaacagttggcccttgagcatgagtcttacgagatgggtgaagcacgtttccgcaagatgtttgagcgtcaacttaaagctggtgaggttgcggataacgctgccgccaagcctctcatcactaccctactccctaagatgattgcacgcatcaacgactggtttgaggaagtgaaagctaagcgcggcaagcgcccgacagccttccagttcctgcaagaaatcaagccggaagccgtagcgtacatcaccattaagaccactctggcttgcctaaccagtgcggaccgtacaaccgttcaggctgtagcaagcgcaatcggtcgggccattgaggacgaggctcgcttcggtcgtatccgtgaccttgaagctaagcacttcaagaaaaactatgaggaacaactcaacaagcgcgtagggcacgtcctgaagcacgcatttatgcaagttgtcgaggctgacatgctctctaagggtctactcggtggcgaggcgtggtcttcgtggcataaggaagactctattcatgtaggagtacgctgcatcgagatgctcattgagtcaaccggaatggttagcttacaccgccaaaatgctggcgtagtaggtcaagactctgagactatcgaactcgcacctgaatacgctgaggctatcgcaacccgtgcaggtgcgctggctggcatctctccgatgttccaaccttgcgtagttcctcctaagccgtggactggcattactggtggtggctattgggctaacggtcgtcgtcctctggcgctggtgcgtactcacagtaagaaaggtctgatgcgctacgaagacgtttacatgcctgaggtgtacaaagcgattaacattgcgcaaaacaccgcctggtcgatcaacaagtgggtcctggcggtcgccaacgtaatcaccaagtggaagcattgtccggtccgggacatccctgcgattgagcgtgaagaactcccgatgaaaccggaagacatcgacatgaatcctgaggctctcaccgcgtggaaacgtgctaaagctgctgtgtaccgcagagacaaggctcgcaagtctcgccgtatcttgcttgagttcatgcttgagcaagccaataagtttgctaaccataaggccatctggttcccttacaacatggactggcgcggtcgtgtttacgctgtgccgatgttcaacccgcaaggtaacgatatgaccaaaggactgcttacgctggcgaaaggtaaaccaatcggtaaggaaggttactactggctgaaaatccacggtgcaaactgtgcgggtgtcgataaggttccgttccctgagcgcatcaagttcattgaggaaaaccacgagaacatcatggcttgcgctaagtctccactggagaacacttggtgggctgagcaagatagtccgttctgcttccttgcgttctgctttgagtacgctggggtacagcaccacggcctgagctataactgctcccttccgctggcgtttgacgggtcttgctctggcatccagcacttctccgcgatgctccgagatgaggtaggtggtcgcgcggttaacttgcttcctagtgaaaccgttcaggacatctacgggattgttgctaagaaagtcaacgagattctacaagcagacgcaatcaatgggaccgataacgaagtagttaccgtgaccgatgagaacgaaggtgaaatctctgagaaagtcaagctgggcactaaggcactggctggtcaatggctggcttacggtgttactcgcagtgtgactaagcgttcagtcatgacgctggcttacgggtccaaagagttcggcttccgtcaacaagtgctgcgccacactattcagtgggctattgattccggcaagggtctgatgttcactcagccgaatcaggctgctggatacatggctaagctgatttgggaatctgtgagcgtgacggtggtagctgcggttgaagcaatgaactggcttaagtctgctgctaagctgctggctgctgaggtcaaagataagaagactggagagattcttcgcaagcgttgcgctgtgcattgggtaactcctgatggtttccctgtgtggcaggaatacaagaagcctattcagacgcgcttgaacctgatgttcctcggtcagttccgcttacagcctaccattaacaccaacaaagatagcgagattgatgcacgtaaacaggagtctggtatcgctcctaactttgtacacagccaagacggtagccaccttcgtaagactgtagtgtgggcacacgagaagtacggaatcgaatcttttgcactgattcacgactccttcggtaccattccggctgacgctgcgaacctgttcaaagcagtgcgcgaaactatggttgacacatatgagtcttgtgatgtactggctgatttctacgaccagttcgctgaccagttgcacgagtctcaattggacaaaatgccagcacttccggctaaaggtaacttgaacctccgtgacatcttagagtcggacttcgcgttcgcg

SEQ ID NO: 374 - protein, 890 aa, synthetic construct
  REGION 1..890: note = Variant of RNA polymerase
MHHHHHHMNTINIAKNDFSDIELAAIPFNTLADHYGEGLAREQLALEHESYEMGEARFRKMFERQLKAGEVADNAAAKPLITTLLPKMIARINDWFEEVKAKRGKRPTAFQFLQEIKPEAVAYITIKTTLACLTSADRTTVQAVASAIGRAIEDEARFGRIRDLEAKHFKKNYEEQLNKRVGHVLKHAFMQVVEADMLSKGLLGGEAWSSWHKEDSIHVGVRCIEMLIESTGMVSLHRQNAGVVGQDSETIELAPEYAEAIATRAGALAGISPMFQPCVVPPKPWTGITGGGYWANGRRPLALVRTHSKKGLMRYEDVYMPEVYKAINIAQNTAWSINKWVLAVANVITKWKHCPVRDIPAIEREELPMKPEDIDMNPEALTAWKRAKAAVYRRDKARKSRRILLEFMLEQANKFANHKAIWFPYNMDWRGRVYAVPMFNPQGNDMTKGLLTLAKGKPIGKEGYYWLKIHGANCAGVDKVPFPERIKFIEENHENIMACAKSPLENTWWAEQDSPFCFLAFCFEYAGVQHHGLSYNCSLPLAFDGSCSGIQHFSAMLRDEVGGRAVNLLPSETVQDIYGIVAKKVNEILQADAINGTDNEVVTVTDENEGEISEKVKLGTKALAGQWLAYGVTRSVTKRSVMTLAYGSKEFGFRQQVLRHTIQWAIDSGKGLMFTQPNQAAGYMAKLIWESVSVTVVAAVEAMNWLKSAAKLLAAEVKDKKTGEILRKRCAVHWVTPDGFPVWQEYKKPIQTRLNLMFLGQFRLQPTINTNKDSEIDARKQESGIAPNFVHSQDGSHLRKTVVWAHEKYGIESFALIHDSFGTIPADAANLFKAVRETMVDTYESCDVLADFYDQFADQLHESQLDKMPALPAKGNLNLRDILESDFAFA

SEQ ID NO: 375 - DNA, 2670 bp, synthetic construct
  misc_feature 1..2670: note = Variant of RNA polymerase
  source 1..2670: mol_type = other DNA
atgcaccatcaccatcaccatatgaacacgattaacatcgctaagaacgacttctctgacatcgaactggctgctatcccgttcaacactctggctgaccattacggtgagggcttagctcgcgaacagttggcccttgagcatgagtcttacgagatgggtgaagcacgtttccgcaagatgtttgagcgtcaacttaaagctggtgaggttgcggataacgctgccgccaagcctctcatcactaccctactccctaagatgattgcacgcatcaacgactggtttgaggaagtgaaagctaagcgcggcaagcgcccgacagccttccagttcctgcaagaaatcaagccggaagccgtagcgtacatcaccattaagaccactctggcttgcctaaccagtgcggaccgtacaaccgttcaggctgtagcaagcgcaatcggtcgggccattgaggacgaggctcgcttcggtcgtatccgtgaccttgaagctaagcacttcaagaaaaactatgaggaacaactcaacaagcgcgtagggcacgtctacaagaaagcatttatgcaagttgtcgaggctgacatgctctctaagggtctactcggtggcgaggcgtggtcttcgtggcataaggaagactctattcatgtaggagtacgctgcatcgagatgctcattgagtcaaccggaatggttagcttacaccgccaaaatgctggcgtagtaggtcaagactctgagactatcgaactcgcacctgaatacgctgaggctatcgcaacccgtgcaggtgcgctggctggcatctctccgatgttccaaccttgcgtagttcctcctaagccgtggactggcattactggtggtggctattgggctaacggtcgtcgtcctctggcgctggtgcgtactcacagtaagaaaggtctgatgcgctacgaagacgtttacatgcctgaggtgtacaaagcgattaacattgcgcaaaacaccgcctggtcgatcaacaagtgggtcctggcggtcgccaacgtaatcaccaagtggaagcattgtccggtccgggacatccctgcgattgagcgtgaagaactcccgatgaaaccggaagacatcgacatgaatcctgaggctctcaccgcgtggaaacgtgctaaagctgctgtgtaccgcagagacaaggctcgcaagtctcgccgtatcttgcttgagttcatgcttgagcaagccaataagtttgctaaccataaggccatctggttcccttacaacatggactggcgcggtcgtgtttacgctgtgccgatgttcaacccgcaaggtaacgatatgaccaaaggactgcttacgctggcgaaaggtaaaccaatcggtaaggaaggttactactggctgaaaatccacggtgcaaactgtgcgggtgtcgataaggttccgttccctgagcgcatcaagttcattgaggaaaaccacgagaacatcatggcttgcgctaagtctccactggagaacacttggtgggctgagcaagatagtccgttctgcttccttgcgttctgctttgagtacgctggggtacagcaccacggcctgagctataactgctcccttccgctggcgtttgacgggtcttgctctggcatccagcacttctccgcgatgctccgagatgaggtaggtggtcgcgcggttaacttgcttcctagtgaaaccgttcaggacatctacgggattgttgctaagaaagtcaacgagattctacaagcagacgcaatcaatgggaccgataacgaagtagttaccgtgaccgatgagaacccgggtgaaatctctgagaaagtcaagctgggcactaaggcactggctggtcaatggctggcttacggtgttactcgcagtgtgactaagcgttcagtcatgacgctggcttacgggtccaaagagttcggcttccgtcaacaagtgctgcgccacactattcagtgggctattgattccggcaagggtctgatgttcactcagccgaatcaggctgctggatacatggctaagctgatttgggaatctgtgagcgtgacggtggtagctgcggttgaagcaatgaactggcttaagtctgctgctaagctgctggctgctgaggtcaaagatgccaaaactggagagattcttcgcaagcgttgcgctgtgcattgggtaactcctgatggtttccctgtgtggcaggaatacaagaagcctattcagacgcgcttgaacctgatgttcctcggtcagttccgcttacagcctaccattaacaccaacaaagatagcgagattgatgcacgtaaacaggagtctggtatcgctcctaactttgtacacagccaagacggtagccaccttcgtaagactgtagtgtgggcacacgagaagtacggaatcgaatcttttgcactgattcacgactccttcggtaccattccggctgacgctgcgaacctgttcaaagcagtgcgcgaaactatggttgacacatatgagtcttgtgatgtactggctgatttctacgaccagttcgctgaccagttgcacgagtctcaattggacaaaatgccagcacttccggctaaaggtaacttgaacctccgtgacatcttagagtcggacttcgcgttcgcg

SEQ ID NO: 376 - protein, 890 aa, synthetic construct
  REGION 1..890: note = Variant of RNA polymerase
MHHHHHHMNTINIAKNDFSDIELAAIPFNTLADHYGEGLAREQLALEHESYEMGEARFRKMFERQLKAGEVADNAAAKPLITTLLPKMIARINDWFEEVKAKRGKRPTAFQFLQEIKPEAVAYITIKTTLACLTSADRTTVQAVASAIGRAIEDEARFGRIRDLEAKHFKKNYEEQLNKRVGHVYKKAFMQVVEADMLSKGLLGGEAWSSWHKEDSIHVGVRCIEMLIESTGMVSLHRQNAGVVGQDSETIELAPEYAEAIATRAGALAGISPMFQPCVVPPKPWTGITGGGYWANGRRPLALVRTHSKKGLMRYEDVYMPEVYKAINIAQNTAWSINKWVLAVANVITKWKHCPVRDIPAIEREELPMKPEDIDMNPEALTAWKRAKAAVYRRDKARKSRRILLEFMLEQANKFANHKAIWFPYNMDWRGRVYAVPMFNPQGNDMTKGLLTLAKGKPIGKEGYYWLKIHGANCAGVDKVPFPERIKFIEENHENIMACAKSPLENTWWAEQDSPFCFLAFCFEYAGVQHHGLSYNCSLPLAFDGSCSGIQHFSAMLRDEVGGRAVNLLPSETVQDIYGIVAKKVNEILQADAINGTDNEVVTVTDENPGEISEKVKLGTKALAGQWLAYGVTRSVTKRSVMTLAYGSKEFGFRQQVLRHTIQWAIDSGKGLMFTQPNQAAGYMAKLIWESVSVTVVAAVEAMNWLKSAAKLLAAEVKDAKTGEILRKRCAVHWVTPDGFPVWQEYKKPIQTRLNLMFLGQFRLQPTINTNKDSEIDARKQESGIAPNFVHSQDGSHLRKTVVWAHEKYGIESFALIHDSFGTIPADAANLFKAVRETMVDTYESCDVLADFYDQFADQLHESQLDKMPALPAKGNLNLRDILESDFAFA

SEQ ID NO: 377 - DNA, 2670 bp, synthetic construct
  misc_feature 1..2670: note = Variant of RNA polymerase
  source 1..2670: mol_type = other DNA
atgcaccatcaccatcaccatatgaacacgattaacatcgctaagaacgacttctctgacatcgaactggctgctatcccgttcaacactctggctgaccattacggtgagggcttagctcgcgaacagttggcccttgagcatgagtcttacgagatgggtgaagcacgtttccgcaagatgtttgagcgtcaacttaaagctggtgaggttgcggataacgctgccgccaagcctctcatcactaccctactccctaagatgattgcacgcatcaacgactggtttgaggaagtgaaagctaagcgcggcaagcgcccgacagccttccagttcctgcaagaaatcaagccggaagccgtagcgtacatcaccattaagaccactctggcttgcctaaccagtgcggaccgtacaaccgttcaggctgtagcaagcgcaatcggtcgggccattgaggacgaggctcgcttcggtcgtatccgtgaccttgaagctaagcacttcaagaaaaactatgaggaacaactcaacaagcgcgtagggcacgtcctgaagctggcatttatgcaagttgtcgaggctgacatgctctctaagggtctactcggtggcgaggcgtggtcttcgtggcataaggaagactctattcatgtaggagtacgctgcatcgagatgctcattgagtcaaccggaatggttagcttacaccgccaaaatgctggcgtagtaggtgttgactctgagactatcgaactcgcacctgaatacgctgaggctatcgcaacccgtgcaggtgcgctggctggcatctctccgatgttccaaccttgcgtagttcctcctaagccgtggactggcattactggtggtggctattgggctaacggtcgtcgtcctctggcgctggtgcgtactcacagtaagaaaggtctgatgcgctacgaagacgtttacatgcctgaggtgtacaaagcgattaacattgcgcaaaacaccgcctggtcgatcaacaagtgggtcctggcggtcgccaacgtaatcaccaagtggaagcattgtccggtccgggacatccctgcgattgagcgtgaagaactcccgatgaaaccggaagacatcgacatgaatcctgaggctctcaccgcgtggaaacgtgctaaagctgctgtgtaccgcagagacaaggctcgcaagtctcgccgtatcttgcttgagttcatgcttgagcaagccaataagtttgctaaccataaggccatctggttcccttacaacatggactggcgcggtcgtgtttacgctgtgccgatgttcaacccgcaaggtaacgatatgaccaaaggactgcttacgctggcgaaaggtaaaccaatcggtaaggaaggttactactggctgaaaatccacggtgcaaactgtgcgggtgtcgataaggttccgttccctgagcgcatcaagttcattgaggaaaaccacgagaacatcatggcttgcgctaagtctccactggagaacacttggtgggctgagcaagatagtccgttctgcttccttgcgttctgctttgagtacgctggggtacagcaccacggcctgagctataactgctcccttccgctggcgtttgacgggtcttgctctggcatccagcacttctccgcgatgctccgagatgaggtaggtggtcgcgcggttaacttgcttcctagtgaaaccgttcaggacatctacgggattgttgctaagaaagtcaacgagattctacaagcagacgcaatcaatgggaccgataacgaagtagttaccgtgaccgatgagaacactggtgaaatctctgagaaagtcaagctgggcactaaggcactggctggtcaatggctggcttacggtgttactcgcagtgtgactaagcgttcagtcatgacgctggcttacgggtccaaagagttcggcttccgtcaacaagtgctgcgccacactattcagtgggctattgattccggcaagggtctgatgttcactcagccgaatcaggctgctggatacatggctaagctgatttgggaatctgtgagcgtgacggtggtagctgcggttgaagcaatgaactggcttaagtctgctgctaagctgctggctgctgaggtcaaagataagaagactggagagattcttcgcaagcgttgcgctgtgcattgggtaactcctgatggtttccctgtgtggcaggaatacaagaagcctattcagacgcgcttgaacctgatgttcctcggtcagttccgcttacagcctaccattaacaccaacaaagatagcgagattgatgcacgtaaacaggagtctggtatcgctcctaactttgtacacagccaagacggtagccaccttcgtaagactgtagtgtgggcacacgagaagtacggaatcgaatcttttgcactgattcacgactccttcggtaccattccggctgacgctgcgaacctgttcaaagcagtgcgcgaaactatggttgacacatatgagtcttgtgatgtactggctgatttctacgaccagttcgctgaccagttgcacgagtctcaattggacaaaatgccagcacttccggctaaaggtaacttgaacctccgtgacatcttagagtcggacttcgcgttcgcg

SEQ ID NO: 378 - protein, 890 aa, synthetic construct
  REGION 1..890: note = Variant of RNA polymerase
MHHHHHHMNTINIAKNDFSDIELAAIPFNTLADHYGEGLAREQLALEHESYEMGEARFRKMFERQLKAGEVADNAAAKPLITTLLPKMIARINDWFEEVKAKRGKRPTAFQFLQEIKPEAVAYITIKTTLACLTSADRTTVQAVASAIGRAIEDEARFGRIRDLEAKHFKKNYEEQLNKRVGHVLKLAFMQVVEADMLSKGLLGGEAWSSWHKEDSIHVGVRCIEMLIESTGMVSLHRQNAGVVGVDSETIELAPEYAEAIATRAGALAGISPMFQPCVVPPKPWTGITGGGYWANGRRPLALVRTHSKKGLMRYEDVYMPEVYKAINIAQNTAWSINKWVLAVANVITKWKHCPVRDIPAIEREELPMKPEDIDMNPEALTAWKRAKAAVYRRDKARKSRRILLEFMLEQANKFANHKAIWFPYNMDWRGRVYAVPMFNPQGNDMTKGLLTLAKGKPIGKEGYYWLKIHGANCAGVDKVPFPERIKFIEENHENIMACAKSPLENTWWAEQDSPFCFLAFCFEYAGVQHHGLSYNCSLPLAFDGSCSGIQHFSAMLRDEVGGRAVNLLPSETVQDIYGIVAKKVNEILQADAINGTDNEVVTVTDENTGEISEKVKLGTKALAGQWLAYGVTRSVTKRSVMTLAYGSKEFGFRQQVLRHTIQWAIDSGKGLMFTQPNQAAGYMAKLIWESVSVTVVAAVEAMNWLKSAAKLLAAEVKDKKTGEILRKRCAVHWVTPDGFPVWQEYKKPIQTRLNLMFLGQFRLQPTINTNKDSEIDARKQESGIAPNFVHSQDGSHLRKTVVWAHEKYGIESFALIHDSFGTIPADAANLFKAVRETMVDTYESCDVLADFYDQFADQLHESQLDKMPALPAKGNLNLRDILESDFAFA

SEQ ID NO: 379 - DNA, 2670 bp, synthetic construct
  misc_feature 1..2670: note = Variant of RNA polymerase
  source 1..2670: mol_type = other DNA
atgcaccatcaccatcaccatatgaacacgattaacatcgctaagaacgacttctctgacatcgaactggctgctatcccgttcaacactctggctgaccattacggtgagggcttagctcgcgaacagttggcccttgagcatgagtcttacgagatgggtgaagcacgtttccgcaagatgtttgagcgtcaacttaaagctggtgaggttgcggataacgctgccgccaagcctctcatcactaccctactccctaagatgattgcacgcatcaacgactggtttgaggaagtgaaagctaagcgcggcaagcgcccgacagccttccagttcctgcaagaaatcaagccggaagccgtagcgtacatcaccattaagaccactctggcttgcctaaccagtgcggaccgtacaaccgttcaggctgtagcaagcgcaatcggtcgggccattgaggacgaggctcgcttcggtcgtatccgtgaccttgaagctaagcacttcaagaaaaactatgaggaacaactcaacaagcgcgtagggcacgtcctgaagcacgcatttatgcaagttgtcgaggctgacatgctctctaagggtctactcggtggcgaggcgtggtcttcgtggcataaggaagactctattcatgtaggagtacgctgcatcgagatgctcattgagtcaaccggaatggttagcttacaccgccaaaatgctggcgtagtaggtcaagactctgagactatcgaactcgcacctgaatacgctgaggctatcgcaacccgtgcaggtgcgctggctggcatctctccgatgttccaaccttgcgtagttcctcctaagccgtggactggcattactggtggtggctattgggctaacggtcgtcgtcctctggcgctggtgcgtactcacagtaagaaaggtctgatgcgctacgaagacgtttacatgcctgaggtgtacaaagcgattaacattgcgcaaaacaccgcctggtcgatcaacaagtgggtcctggcggtcgccaacgtaatcaccaagtggaagcattgtccggtccgggacatccctgcgattgagcgtgaagaactcccgatgaaaccggaagacatcgacatgaatcctgaggctctcaccgcgtggaaacgtgctaaagctgctgtgtaccgcagagacaaggctcgcaagtctcgccgtatcttgcttgagttcatgcttgagcaagccaataagtttgctaaccataaggccatctggttcccttacaacatggactggcgcggtcgtgtttacgctgtgtcgatgttcaacccgcaaggtaacgatatgaccaaaggactgcttacgctggcgaaaggtaaaccaatcggtaaggaaggttactactggctgaaaatccacggtgcaaactgtgcgggtgtcgataaggttccgttccctgagcgcatcaagttcattgaggaaaaccacgagaacatcatggcttgcgctaagtctccactggagaacacttggtgggctgagcaagatagtccgttctgcttccttgcgttctgctttgagtacgctggggtacagcaccacggcctgagctataactgctcccttccgctggcgtttgacgggtcttgctctggcatccagcacttctccgcgatgctccgagatgaggtaggtggtcgcgcggttaacttgcttcctagtgaaaccgttcaggacatctacgggattgttgctaagaaagtcaacgagattctacaagcagacgcaatcaatgggaccgataacgaagtagttaccgtgaccgatgagaacccgggtgaaatctctgagaaagtcaagctgggcactaaggcactggctggtcaatggctggcttacggtgttactcgcagtgtgactaagcgttcagtcatgacgctggcttacgggtccaaagagttcggcttccgtcaacaagtgctgcgccacactattcagtgggctattgattccggcaagggtctgatgttcactcagccgaatcaggctgctggatacatggctaagctgatttgggaatctgtgagcgtgacggtggtagctgcggttgaagcaatgaactggcttaagtctgctgctaagctgctggctgctgaggtcaaagatgccaaaactggagagattcttcgcaagcgttgcgctgtgcattgggtaactcctgatggtttccctgtgtggcaggaatacaagaagcctattcagacgcgcttgaacctgatgttcctcggtcagttccgcttacagcctaccattaacaccaacaaagatagcgagattgatgcacgtaaacaggagtctggtatcgctcctaactttgtacacagccaagacggtagccaccttcgtaagactgtagtgtgggcacacgagaagtacggaatcgaatcttttgcactgattcacgactccttcggtaccattccggctgacgctgcgaacctgttcaaagcagtgcgcgaaactatggttgacacatatgagtcttgtgatgtactggctgatttctacgaccagttcgctgaccagttgcacgagtctcaattggacaaaatgccagcacttccggctaaaggtaacttgaacctccgtgacatcttagagtcggacttcgcgttcgcg

SEQ ID NO: 380 - protein, 890 aa, synthetic construct
  REGION 1..890: note = Variant of RNA polymerase
MHHHHHHMNTINIAKNDFSDIELAAIPFNTLADHYGEGLAREQLALEHESYEMGEARFRKMFERQLKAGEVADNAAAKPLITTLLPKMIARINDWFEEVKAKRGKRPTAFQFLQEIKPEAVAYITIKTTLACLTSADRTTVQAVASAIGRAIEDEARFGRIRDLEAKHFKKNYEEQLNKRVGHVLKHAFMQVVEADMLSKGLLGGEAWSSWHKEDSIHVGVRCIEMLIESTGMVSLHRQNAGVVGQDSETIELAPEYAEAIATRAGALAGISPMFQPCVVPPKPWTGITGGGYWANGRRPLALVRTHSKKGLMRYEDVYMPEVYKAINIAQNTAWSINKWVLAVANVITKWKHCPVRDIPAIEREELPMKPEDIDMNPEALTAWKRAKAAVYRRDKARKSRRILLEFMLEQANKFANHKAIWFPYNMDWRGRVYAVSMFNPQGNDMTKGLLTLAKGKPIGKEGYYWLKIHGANCAGVDKVPFPERIKFIEENHENIMACAKSPLENTWWAEQDSPFCFLAFCFEYAGVQHHGLSYNCSLPLAFDGSCSGIQHFSAMLRDEVGGRAVNLLPSETVQDIYGIVAKKVNEILQADAINGTDNEVVTVTDENPGEISEKVKLGTKALAGQWLAYGVTRSVTKRSVMTLAYGSKEFGFRQQVLRHTIQWAIDSGKGLMFTQPNQAAGYMAKLIWESVSVTVVAAVEAMNWLKSAAKLLAAEVKDAKTGEILRKRCAVHWVTPDGFPVWQEYKKPIQTRLNLMFLGQFRLQPTINTNKDSEIDARKQESGIAPNFVHSQDGSHLRKTVVWAHEKYGIESFALIHDSFGTIPADAANLFKAVRETMVDTYESCDVLADFYDQFADQLHESQLDKMPALPAKGNLNLRDILESDFAFA

SEQ ID NO: 381 - DNA, 2670 bp, synthetic construct
  misc_feature 1..2670: note = Variant of RNA polymerase
  source 1..2670: mol_type = other DNA
atgcaccatcaccatcaccatatgaacacgattaacatcgctaagaacgacttctctgacatcgaactggctgctatcccgttcaacactctggctgaccattacggtgagcgtttagctcgcgaacagttggcccttgagcatgagtcttacgagatgggtgaagcacgtttccgcaagatgtttgagcgtcaacttaaagctggtgaggttgcggataacgctgccgccaagcctctcatcactaccctactccctaagatgattgcacgcatcaacgactggtttgaggaagtgaaagctaagcgcggcaagcgcccgacagccttccagttcctgcaagaaatcaagccggaagccgtagcgtacatcaccattaagaccactctggcttgcctaaccagtgcggaccgtacaaccgttcaggctgtagcaagcgcaatcggtcgggccattgaggacgaggctcgcttcggtcgtatccgtgaccttgaagctaagcacttcaagaaaaactatgaggaacaactcaacaagcgcgtagggcacgtctacaagaaagcatttatgcaagttgtcgaggctgacatgctctctaagggtctactcggtggcgaggcgtggtcttcgtggcataaggaagactctattcatgtaggagtacgctgcatcgagatgctcattgagtcaaccggaatggttagcttacaccgccaaaatgctggcgtagtaggtcaagactctgagactatcgaactcgcacctgaatacgctgaggctatcgcaacccgtgcaggtgcgctggctggcatctctccgatgttccaaccttgcgtagttcctcctaagccgtggactggcattactggtggtggctattgggctaacggtcgtcgtcctctggcgctggtgcgtactcacagtaagaaaggtctgatgcgctacgaagacgtttacatgcctgaggtgtacaaagcgattaacattgcgcaaaacaccgcctggtcgatcaacaagtgggtcctggcggtcgccaacgtaatcaccaagtggaagcattgtccggtcgaggacatccctgcgattgagcgtgaagaactcccgatgaaaccggaagacatcgacatgaatcctgaggctctcaccgcgtggaaacgtgctaaagctgctgtgtaccgcaaggacaaggctcgcaagtctcgccgtatcttgcttgagttcatgcttgagcaagccaataagtttgctaaccataaggccatctggttcccttacaacatggactggcgcggtcgtgtttacgctgtgtcaatgttcaacccgcaaggtaacgatatgaccaaaggactgcttacgctggcgaaaggtaaaccaatcggtaaggaaggttactactggctgaaaatccacggtgcaaactgtgcgggtgtcgataaggttccgttccctgagcgcatcaagttcattgaggaaaaccacgagaacatcatggcttgcgctaagtctccactggagaacacttggtgggctgagcaagatagtccgttctgcttccttgcgttctgctttgagtacgctggggtacagcaccacggcctgagctataactgctcccttccgctggcgtttgacgggtcttgctctggcatccagcacttctccgcgatgctccgagatgaggtaggtggtcgcgcggttaacttgcttcctagtgaaaccgttcaggacatctacgggattgttgctaagaaagtcaacgagattctacaagcagacgcaatcaatgggaccgataacgaagtagttaccgtgaccgatgagaacactggtgaaatctctgagaaagtcaagctgggcactaaggcactggctggtcaatggctggcttacggtgttactcgcagtgtgactaagcgttcagtcatgacgctggcttacgggtccaaagagttcggcttccgtcaacaagtgctgcgccacactattcagccagctattgattccggcaagggtctgatgttcactcagccgaatcaggctgctggatacatggctaagctgatttgggaatctgtgagcgtgacggtggtagctgcggttgaagcaatgaactggcttaagtctgctgctaagctgctggctgctgaggtcaaagataagaagactggagagattcttcgcaagcgttgcgctgtgcattgggtaactcctgatggtttccctgtgtggcaggaatacaagaagcctattcagacgcgcttgaacctgatgttcctcggtcagttccgcttacagcctaccattaacaccaacaaagatagcgagattgatgcacacaaacaggagtctggtatcgctcctaactttgtacacagccaagacggtagccaccttcgtaagactgtagtgtgggcacacgagaagtacggaatcgaatcttttgcactgattcacgactccttcggtaccattccggctgacgctgcgaacctgttcaaagcagtgcgcgaaactatggttgacacatatgagtcttgtgatgtactggctgatttctacgaccagttcgctgaccagttgcacgagtctcaattggacaaaatgccagcacttccggctaaaggtaacttgaacctccgtgacatcttagagtcggacttcgcgttcgcg

SEQ ID NO: 382 - protein, 890 aa, synthetic construct
  REGION 1..890: note = Variant of RNA polymerase
MHHHHHHMNTINIAKNDFSDIELAAIPFNTLADHYGERLAREQLALEHESYEMGEARFRKMFERQLKAGEVADNAAAKPLITTLLPKMIARINDWFEEVKAKRGKRPTAFQFLQEIKPEAVAYITIKTTLACLTSADRTTVQAVASAIGRAIEDEARFGRIRDLEAKHFKKNYEEQLNKRVGHVYKKAFMQVVEADMLSKGLLGGEAWSSWHKEDSIHVGVRCIEMLIESTGMVSLHRQNAGVVGQDSETIELAPEYAEAIATRAGALAGISPMFQPCVVPPKPWTGITGGGYWANGRRPLALVRTHSKKGLMRYEDVYMPEVYKAINIAQNTAWSINKWVLAVANVITKWKHCPVEDIPAIEREELPMKPEDIDMNPEALTAWKRAKAAVYRKDKARKSRRILLEFMLEQANKFANHKAIWFPYNMDWRGRVYAVSMFNPQGNDMTKGLLTLAKGKPIGKEGYYWLKIHGANCAGVDKVPFPERIKFIEENHENIMACAKSPLENTWWAEQDSPFCFLAFCFEYAGVQHHGLSYNCSLPLAFDGSCSGIQHFSAMLRDEVGGRAVNLLPSETVQDIYGIVAKKVNEILQADAINGTDNEVVTVTDENTGEISEKVKLGTKALAGQWLAYGVTRSVTKRSVMTLAYGSKEFGFRQQVLRHTIQPAIDSGKGLMFTQPNQAAGYMAKLIWESVSVTVVAAVEAMNWLKSAAKLLAAEVKDKKTGEILRKRCAVHWVTPDGFPVWQEYKKPIQTRLNLMFLGQFRLQPTINTNKDSEIDAHKQESGIAPNFVHSQDGSHLRKTVVWAHEKYGIESFALIHDSFGTIPADAANLFKAVRETMVDTYESCDVLADFYDQFADQLHESQLDKMPALPAKGNLNLRDILESDFAFA

SEQ ID NO: 383 - DNA, 2670 bp, synthetic construct
  misc_feature 1..2670: note = Variant of RNA polymerase
  source 1..2670: mol_type = other DNA
atgcaccatcaccatcaccatatgaacacgattaacatcgctaagaacgacttctctgacatcgaactggctgctatcccgttcaacactctggctgaccattacggtgagcgtttagctcgcgaacagttggcccttgagcatgagtcttacgagatgggtgaagcacgcttccgcaagatgtttgagcgtcaacttaaagctggtgaggttgcggataacgctgccgccaagcctctcatcactaccctactccctaagatgattgcacgcatcaacgactggtttgaggaagtgaaagctaagcgcggcaagcgcccgacagccttccagttcctgcaagaaatcaagccggaagccgtagcgtacatcaccattaagaccactctggcttgcctaaccagtgctgacaatacaaccgttcaggctgtagcaagcgcaatcggtcgggccattgaggacgaggctcgcttcggtcgtatccgtgaccttgaagctaagcacttcaagaaaaactatgaggaacaactcaacaagcgcgtagggcacgtctacaagaaagcatttatgcaagttgtcgaggctgacatgctctctaagggtctactcggtggcgaggcgtggtcttcgtggcataaggaagactctattcatgtaggagtacgctgcatcgagatgctcattgagtcaaccggaatggttagcttacaccgccaaaatgctggcgtagtaggtcaagactctgagactatcgaactcgcacctgaatacgctgaggctatcgcaacccgtgcaggtgcgctggctggcatctctccgatgttccaaccttgcgtagttcctcctaagccgtggactggcattactggtggtggctattgggctaacggtcgtcgtcctctggcgctggtgcgtactcacagtaagaaagcactgatgcgctacgaagacgtttacatgcctgaggtgtacaaagcgattaacattgcgcaaaacaccgcatggaaaatcaacaagaaagtcctagcggtcgccaacgtaatcaccaagtggaagcattgtccggtcgaggacatccctgcgattgagcgtgaagaactcccgatgaaaccggaagacatcgacatgaatcctgaggctctcaccgcgtggaaacgtgctgccgctgctgtgtaccgcaaggacaaggctcgcaagtctcgccgtatcagccttgagttcatgcttgagcaagccaataagtttgctaaccataaggccatctggttcccttacaacatggactggcgcggtcgtgtttacgctgtgtcaatgttcaacccgcaaggtaacgatatgaccaaaggactgcttacgctggcgaaaggtaaaccaatcggtaaggaaggttactactggctgaaaatccacggtgcaaactgtgcgggtgtcgataaggttccgttccctgagcgcatcaagttcattgaggaaaaccacgagaacatcatggcttgcgctaagtctccactggagaacacttggtgggctgagcaagattctccgttctgcttccttgcgttctgctttgagtacgctggggtacagcaccacggcctgagctataactgctcccttccgctggcgtttgacgggtcttgctctggcatccagcacttctccgcgatgctccgagatgaggtaggtggtcgcgcggttaacttgcttcctagtgaaaccgttcaggacatctacgggattgttgctaagaaagtcaacgagattctacaagcagacgcaatcaatgggaccgataacgaagtagttaccgtgaccgatgagaacactggtgaaatctctgagaaagtcaagctgggcactaaggcactggctggtcaatggctggcttacggtgttactcgcagtgtgactaagcgttcagtcatgacgctggcttacgggtccaaagagttcggcttccgtcaacaagtgctgcgccacaccattcagccagctattgattccggcaagggtctgatgttcactcagccgaatcaggctgctggatacatggctaagctgatttgggaatctgtgagcgtgacggtggtagctgcggttgaagcaatgaactggcttaagtctgctgctaagctgctggctgctgaggtcaaagataagaagactggagagattcttcgcaagcgttgcgctgtgcattgggtaactcctgatggtttccctgtgtggcaggaatacaagaagcctattcagacgcgcttgaacctgatgttcctcggtcagttccgcttacagcctaccattaacaccaacaaagatagcgagattgatgcacacaaacaggagtctggtatcgctcctaactttgtacacagccaagacggtagccaccttcgtaagactgtagtgtgggcacacgagaagtacggaatcgaatcttttgcactgattcacgactccttcggtaccattccggctgacgctgcgaacctgttcaaagcagtgcgcgaaactatggttgacacatatgagtcttgtgatgtactggctgatttctacgaccagttcgctgaccagttgcacgagtctcaattggacaaaatgccagcacttccggctaaaggtaacttgaacctccgtgacatcttagagtcggacttcgcgttcgcg

SEQ ID NO: 384 - protein, 890 aa, synthetic construct
  REGION 1..890: note = Variant of RNA polymerase
MHHHHHHMNTINIAKNDFSDIELAAIPFNTLADHYGERLAREQLALEHESYEMGEARFRKMFERQLKAGEVADNAAAKPLITTLLPKMIARINDWFEEVKAKRGKRPTAFQFLQEIKPEAVAYITIKTTLACLTSADNTTVQAVASAIGRAIEDEARFGRIRDLEAKHFKKNYEEQLNKRVGHVYKKAFMQVVEADMLSKGLLGGEAWSSWHKEDSIHVGVRCIEMLIESTGMVSLHRQNAGVVGQDSETIELAPEYAEAIATRAGALAGISPMFQPCVVPPKPWTGITGGGYWANGRRPLALVRTHSKKALMRYEDVYMPEVYKAINIAQNTAWKINKKVLAVANVITKWKHCPVEDIPAIEREELPMKPEDIDMNPEALTAWKRAAAAVYRKDKARKSRRISLEFMLEQANKFANHKAIWFPYNMDWRGRVYAVSMFNPQGNDMTKGLLTLAKGKPIGKEGYYWLKIHGANCAGVDKVPFPERIKFIEENHENIMACAKSPLENTWWAEQDSPFCFLAFCFEYAGVQHHGLSYNCSLPLAFDGSCSGIQHFSAMLRDEVGGRAVNLLPSETVQDIYGIVAKKVNEILQADAINGTDNEVVTVTDENTGEISEKVKLGTKALAGQWLAYGVTRSVTKRSVMTLAYGSKEFGFRQQVLRHTIQPAIDSGKGLMFTQPNQAAGYMAKLIWESVSVTVVAAVEAMNWLKSAAKLLAAEVKDKKTGEILRKRCAVHWVTPDGFPVWQEYKKPIQTRLNLMFLGQFRLQPTINTNKDSEIDAHKQESGIAPNFVHSQDGSHLRKTVVWAHEKYGIESFALIHDSFGTIPADAANLFKAVRETMVDTYESCDVLADFYDQFADQLHESQLDKMPALPAKGNLNLRDILESDFAFA

SEQ ID NO: 385 - DNA, 2670 bp, synthetic construct; identical to SEQ ID NO: 381
  misc_feature 1..2670: note = Variant of RNA polymerase
  source 1..2670: mol_type = other DNA

SEQ ID NO: 386 - protein, 890 aa, synthetic construct; identical to SEQ ID NO: 382
  REGION 1..890: note = Variant of RNA polymerase

SEQ ID NO: 387 - DNA, 2670 bp, synthetic construct
  misc_feature 1..2670: note = Variant of RNA polymerase
  source 1..2670: mol_type = other DNA
atgcaccatcaccatcaccatatgaacacgattaacatcgctaagaacgacttctctgacatcgaactggctgctatcccgttcaacactctggctgaccattacggtgagcgtttagctcgcgaacagttggcccttgagcatgagtcttacgagatgggtgaagcacgtttccgcaagatgtttgagcgtcaacttaaagctggtgaggttgcggataacgctgccgccaagcctctcatcactaccctactccctaagatgattgcacgcatcaacgactggtttgaggaagtgaaagctaagcgcggcaagcgcccgacagccttccagttcctgcaagaaatcaagccggaagccgtagcgtacatcaccattaagaccactctggcttgcctaaccagtgcggaccgtacaaccgttcaggctgtagcaagcgcaatcggtcgggccattgaggacgaggctcgcttcggtcgtatccgtgaccttgaagctaagcacttcctgaaaaactacgaggaacaactcaacaagcgcgtagggcacgtctacaagaaagcatttatgcaagttgtcgaggctgacatgctctctaagggtctactcggtggcgaggcgtggtcttcgtggcataaggaagactctattcatgtaggagtacgctgcatcgagatgctcattgagtcaaccggaatggttagcttacaccgccaaaatgctggcgtagtaggtcaagactctgagactatcgaactcgcacctgaatacgctgaggctatcgcaacccgtgcaggtgcgctggctggcatctctccgatgttccaaccttgcgtagttcctcctaagccgtggactggcattactggtggtggctattgggctaacggtcgtcgtcctctggcgctggtgcgtactcacagtaagaaaggtctgatgcgctacgaagacgtttacatgcctgaggtgtacaaagcgattaacattgcgcaaaacaccgcctggtcgatcaacaagtgggtcctggcggtcgccaacgtaatcaccaagtggaagcattgtccggtcgaggacatccctgcgattgagcgtgaagaactcccgatgaaaccggaagacatcgacatgaatcctgaggctctcaccgcgtggaaacgtgctaaagctgctgtgtaccgcaaggacaaggctcgcaagtctcgccgtatcttgcttgagttcatgcttgagcaagccaataagtttgctaaccataaggccatctggttcccttacaacatggactggcgcggtcgtgtttacgctgtgtcaatgttcaacccgcaaggtaacgatatgaccaaaggactgcttacgctggcgaaaggtaaaccaatcggtaaggaaggttactactggctgaaaatccacggtgcaaactgtgcgggtgtcgataaggttccgttccctgagcgcatcaagttcattgaggaaaaccacgagaacatcatggcttgcgctaagtctccactggagaacacttggtgggctgagcaagatagtccgttctgcttccttgcgttctgctttgagtacgctggggtacagcaccacggcctgagctataactgctcccttccgctggcgtttgacgggtcttgctctggcatccagcacttctccgcgatgctccgagatgaggtaggtggtcgcgcggttaacttgcttcctagtgaaaccgttcaggacatctacgggattgttgctaagaaagtcaacgagattctacaagcagacgcaatcaatgggaccgataacgaagtagttaccgtgaccgatgagaacccgggtgaaatctctgagaaagtcaagctgggcactaaggcactggctggtcaatggctggcttacggtgttactcgcagtgtgactaagcgttcagtcatgacgctggcttacgggtccaaagagttcggcttccgtcaacaagtgctgcgccacactattcagccagctattgattccggcaagggtctgatgttcactcagccgaatcaggctgctggatacatggctaagctgatttgggaatctgtgagcgtgacggtggtagctgcggttgaagcaatgaactggcttaagtctgctgctaagctgctggctgctgaggtcaaagataagaaaactggagagattcttcgcaagcgttgcgctgtgcattgggtaactcctgatggtttccctgtgtggcaggaatacaagaagcctattcagacgcgcttgaacctgatgttcctcggtcagttccgcttacagcctaccattaacaccaacaaagatagcgagattgatgcacacaaacaggagtctggtatcgctcctaactttgtacacagccaagacggtagccaccttcgtaagactgtagtgtgggcacacgagaagtacggaatcgaatcttttgcactgattcacgactccttcggtaccattccggctgacgctgcgaacctgttcaaagcagtgcgcgaaactatggttgacacatatgagtcttgtgatgtactggctgatttctacgaccagttcgctgaccagttgcacgagtctcaattggacaaaatgccagcacttccggctaaaggtaacttgaacctccgtgacatcttagagtcggacttcgcgttcgcg

SEQ ID NO: 388 - protein, 890 aa, synthetic construct
  REGION 1..890: note = Variant of RNA polymerase
MHHHHHHMNTINIAKNDFSDIELAAIPFNTLADHYGERLAREQLALEHESYEMGEARFRKMFERQLKAGEVADNAAAKPLITTLLPKMIARINDWFEEVKAKRGKRPTAFQFLQEIKPEAVAYITIKTTLACLTSADRTTVQAVASAIGRAIEDEARFGRIRDLEAKHFLKNYEEQLNKRVGHVYKKAFMQVVEADMLSKGLLGGEAWSSWHKEDSIHVGVRCIEMLIESTGMVSLHRQNAGVVGQDSETIELAPEYAEAIATRAGALAGISPMFQPCVVPPKPWTGITGGGYWANGRRPLALVRTHSKKGLMRYEDVYMPEVYKAINIAQNTAWSINKWVLAVANVITKWKHCPVEDIPAIEREELPMKPEDIDMNPEALTAWKRAKAAVYRKDKARKSRRILLEFMLEQANKFANHKAIWFPYNMDWRGRVYAVSMFNPQGNDMTKGLLTLAKGKPIGKEGYYWLKIHGANCAGVDKVPFPERIKFIEENHENIMACAKSPLENTWWAEQDSPFCFLAFCFEYAGVQHHGLSYNCSLPLAFDGSCSGIQHFSAMLRDEVGGRAVNLLPSETVQDIYGIVAKKVNEILQADAINGTDNEVVTVTDENPGEISEKVKLGTKALAGQWLAYGVTRSVTKRSVMTLAYGSKEFGFRQQVLRHTIQPAIDSGKGLMFTQPNQAAGYMAKLIWESVSVTVVAAVEAMNWLKSAAKLLAAEVKDKKTGEILRKRCAVHWVTPDGFPVWQEYKKPIQTRLNLMFLGQFRLQPTINTNKDSEIDAHKQESGIAPNFVHSQDGSHLRKTVVWAHEKYGIESFALIHDSFGTIPADAANLFKAVRETMVDTYESCDVLADFYDQFADQLHESQLDKMPALPAKGNLNLRDILESDFAFA

SEQ ID NO: 389 - DNA, 2670 bp, synthetic construct
  misc_feature 1..2670: note = Variant of RNA polymerase
  source 1..2670: mol_type = other DNA
atgcaccatcaccatcaccatatgaacacgattaacatcgctaagaacgacttctctgacatcgaactggctgctatcccgttcaacactctggctgaccattacggtgagggtttagctcgcgaacagttggcccttgagcatgagtcttacgagatgggtgaagcacgtttccgcaagatgtttgagcgtcaacttaaagctggtgaggttgcggataacgctgccgccaagcctctcatcactaccctactccctaagatgattgcacgcatcaacgactggtttgaggaagtgaaagctaagcgcggcaagcgcccgacagccttccagttcctgcaagaaatcaagccggaagccgtagcgtacatcaccattaagaccactctggcttgcctaaccagtgcggaccgtacaaccgttcaggctgtagcaagcgcaatcggtcgggccattgaggacgaggctcgcttcggtcgtatccgtgaccttgaagctaagcacttcaagaaaaactacgaggaacaactcaacaagcgcgtagggcacgtcctgaagctggcatttatgcaagttgtcgaggctgacatgctctctaagggtctactcggtggcgaggcgtggtcttcgtggcataaggaagactctattcatgtaggagtacgctgcatcgagatgctcattgagtcaaccggaatggttagcttacaccgccaaaatgctggcgtagtaggtcaagactctgagactatcgaactcgcacctgaatacgctgaggctatcgcaacccgtgcaggtgcgctggctggcatctctccgatgttccaaccttgcgtagttcctcctaagccgtggactggcattactggtggtggctattgggctaacggtcgtcgtcctctggcgctggtgcgtactcacagtaagaaaggtctgatgcgctacgaagacgtttacatgcctgaggtgtacaaagcgattaacattgcgcaaaacaccgcctggtcgatcaacaagtgggtcctggcggtcgccaacgtaatcaccaagtggaagcattgtccggtcgaggacatccctgcgattgagcgtgaagaactcccgatgaaaccggaagacatcgacatgaatcctgaggctctcaccgcgtggaaacgtgctaaagctgctgtgtaccgcaaggacaaggctcgcaagtctcgccgtatcttgcttgagttcatgcttgagcaagccaataagtttgctaaccataaggccatctggttcccttacaacatggactggcgcggtcgtgtttacgctgtgtcaatgttcaacccgcaaggtaacgatatgaccaaaggactgcttacgctggcgaaaggtaaaccaatcggtaaggaaggttactactggctgaaaatccacggtgcaaactgtgcgggtgtcgataaggttccgttccctgagcgcatcaagttcattgaggaaaaccacgagaacatcatggcttgcgctaagtctccactggagaacacttggtgggctgagcaagatagtccgttctgcttccttgcgttctgctttgagtacgctggggtacagcaccacggcctgagctataactgctcccttccgctggcgtttgacgggtcttgctctggcatccagcacttctccgcgatgctccgagatgaggtaggtggtcgcgcggttaacttgcttcctagtgaaaccgttcaggacatctacgggattgttgctaagaaagtcaacgagattctacaagcagacgcaatcaatgggaccgataacgaagtagttaccgtgaccgatgagaactgcggtgaaatctctgagaaagtcaagctgggcactaaggcactggctggtcaatggctggcttacggtgttactcgcagtgtgactaagcgttcagtcatgacgctggcttacgggtccaaagagttcggcttccgtcaacaagtgctgcgccacactattcagccagctattgattccggcaagggtctgatgttcactcagccgaatcaggctgctggatacatggctaagctgatttgggaatctgtgagcgtgacggtggtagctgcggttgaagcaatgaactggcttaagtctgctgctaagctgctggctgctgaggtcaaagataagaaaactggagagattcttcgcaagcgttgcgctgtgcattgggtaactcctgatggtttccctgtgtggcaggaatacaagaagcctattcagacgcgcttgaacctgatgttcctcggtcagttccgcttacagcctaccattaacaccaacaaagatagcgagattgatgcacacaaacaggagtctggtatcgctcctaactttgtacacagccaagacggtagccaccttcgtaagactgtagtgtgggcacacgagaagtacggaatcgaatcttttgcactgattcacgactccttcggtaccattccggctgacgctgcgaacctgttcaaagcagtgcgcgaaactatggttgacacatatgagtcttgtgatgtactggctgatttctacgaccagttcgctgaccagttgcacgagtctcaattggacaaaatgccagcacttccggctaaaggtaacttgaacctccgtgacatcttagagtcggacttcgcgttcgcg

SEQ ID NO: 390 - protein, 890 aa, synthetic construct
  REGION 1..890: note = Variant of RNA polymerase
MHHHHHHMNTINIAKNDFSDIELAAIPFNTLADHYGEGLAREQLALEHESYEMGEARFRKMFERQLKAGEVADNAAAKPLITTLLPKMIARINDWFEEVKAKRGKRPTAFQFLQEIKPEAVAYITIKTTLACLTSADRTTVQAVASAIGRAIEDEARFGRIRDLEAKHFKKNYEEQLNKRVGHVLKLAFMQVVEADMLSKGLLGGEAWSSWHKEDSIHVGVRCIEMLIESTGMVSLHRQNAGVVGQDSETIELAPEYAEAIATRAGALAGISPMFQPCVVPPKPWTGITGGGYWANGRRPLALVRTHSKKGLMRYEDVYMPEVYKAINIAQNTAWSINKWVLAVANVITKWKHCPVEDIPAIEREELPMKPEDIDMNPEALTAWKRAKAAVYRKDKARKSRRILLEFMLEQANKFANHKAIWFPYNMDWRGRVYAVSMFNPQGNDMTKGLLTLAKGKPIGKEGYYWLKIHGANCAGVDKVPFPERIKFIEENHENIMACAKSPLENTWWAEQDSPFCFLAFCFEYAGVQHHGLSYNCSLPLAFDGSCSGIQHFSAMLRDEVGGRAVNLLPSETVQDIYGIVAKKVNEILQADAINGTDNEVVTVTDENCGEISEKVKLGTKALAGQWLAYGVTRSVTKRSVMTLAYGSKEFGFRQQVLRHTIQPAIDSGKGLMFTQPNQAAGYMAKLIWESVSVTVVAAVEAMNWLKSAAKLLAAEVKDKKTGEILRKRCAVHWVTPDGFPVWQEYKKPIQTRLNLMFLGQFRLQPTINTNKDSEIDAHKQESGIAPNFVHSQDGSHLRKTVVWAHEKYGIESFALIHDSFGTIPADAANLFKAVRETMVDTYESCDVLADFYDQFADQLHESQLDKMPALPAKGNLNLRDILESDFAFA

SEQ ID NO: 391 - DNA, 2670 bp, synthetic construct
  misc_feature 1..2670: note = Variant of RNA polymerase
  source 1..2670: mol_type = other DNA
atgcaccatcaccatcaccatatgaacacgattaacatcgctaagaacgacttctctgacatcgaactggctgctatcccgttcaacactctggctgaccattacggtgagggtttagctcgcgaacagttggcccttgagcatgagtcttacgagatgggtgaagcacgtttccgcaagatgtttgagcgtcaacttaaagctggtgaggttgcggataacgctgccgccaagcctctcatcactaccctactccctaagatgattgcacgcatcaacgactggtttgaggaagtgaaagctaagcgcggcaagcgcccgacagccttccagttcctgcaagaaatcaagccggaagccgtagcgtacatcaccattaagaccactctggcttgcctaaccagtgcggaccgtacaaccgttcaggctgtagcaagcgcaatcggtcgggccattgaggacgaggctcgcttcggtcgtatccgtgaccttgaagctaagcacttcaagaaaaactatgaggaacaactcaacaagcgcgtagggcacgtcctgaagcacgcatttatgcaagttgtcgaggctgacatgctctctaagggtctactcggtggcgaggcgtggtcttcgtggcataaggaagactctattcatgtaggagtacgctgcatcgagatgctcattgagtcaaccggaatggttagcttacaccgccaaaatgctggcgtagtaggtcaagactctgagactatcgaactcgcacctgaatacgctgaggctatcgcaacccgtgcaggtgcgctggctggcatctctccgatgttccaaccttgcgtagttcctcctaagccgtggactggcattactggtggtggctattgggctaacggtcgtcgtcctctggcgctggtgcgtactcacagtaagaaaggtctgatgcgctacgaagacgtttacatgcctgaggtgtacaaagcgattaacattgcgcaaaacaccgcctggtcgatcaacaagtgggtcctggcggtcgccaacgtaatcaccaagtggaagcattgtccggtcgaggacatccctgcgattgagcgtgaagaactcccgatgaaaccggaagacatcgacatgaatcctgaggctctcaccgcgtggaaacgtgctaaagctgctgtgtaccgcaaggacaaggctcgcaagtctcgccgtatcttgcttgagttcatgcttgagcaagccaataagtttgctaaccataaggccatctggttcccttacaacatggactggcgcggtcgtgtttacgctgtgtcaatgttcaacccgcaaggtaacgatatgaccaaaggactgcttacgctggcgaaaggtaaaccaatcggtaaggaaggttactactggctgaaaatccacggtgcaaactgtgcgggtgtcgataaggttccgttccctgagcgcatcaagttcattgaggaaaaccacgagaacatcatggcttgcgctaagtctccactggagaacacttggtgggctgagcaagatagtccgttctgcttccttgcgttctgctttgagtacgctggggtacagcaccacggcctgagctataactgctcccttccgctggcgtttgacgggtcttgctctggcatccagcacttctccgcgatgctccgagatgaggtaggtggtcgcgcggttaacttgcttcctagtgaaaccgttcaggacatctacgggattgttgctaagaaagtcaacgagattctacaagcagacgcaatcaatgggaccgataacgaagtagttaccgtgaccgatgagaacactggtgaaatctctgagaaagtcaagctgggcactaaggcactggctggtcaatggctggcttacggtgttactcgcagtgtgactaagcgttcagtcatgacgctggcttacgggtccaaagagttcggcttccgtcaacaagtgctgcgccacactattcagccagctattgattccggcaagggtctgatgttcactcagccgaatcaggctgctggatacatggctaagctgatttgggaatctgtgagcgtgacggtggtagctgcggttgaagcaatgaactggcttaagtctgctgctaagctgctggctgctgaggtcaaagataagaagactggagagattcttcgcaagcgttgcgctgtgcattgggtaactcctgatggtttccctgtgtggcaggaatacaagaagcctattcagacgcgcttgaacctgatgttcctcggtcagttccgcttacagcctaccattaacaccaacaaagatagcgagattgatgcacacaaacaggagtctggtatcgctcctaactttgtacacagccaagacggtagccaccttcgtaagactgtagtgtgggcacacgagaagtacggaatcgaatcttttgcactgattcacgactccttcggtaccattccggctgacgctgcgaacctgttcaaagcagtgcgcgaaactatggttgacacatatgagtcttgtgatgtactggctgatttctacgaccagttcgctgaccagttgcacgagtctcaattggacaaaatgccagcacttccggctaaaggtaacttgaacctccgtgacatcttagagtcggacttcgcgttcgcg

SEQ ID NO: 392 - protein, 890 aa, synthetic construct
  REGION 1..890: note = Variant of RNA polymerase
MHHHHHHMNTINIAKNDFSDIELAAIPFNTLADHYGEGLAREQLALEHESYEMGEARFRKMFERQLKAGEVADNAAAKPLITTLLPKMIARINDWFEEVKAKRGKRPTAFQFLQEIKPEAVAYITIKTTLACLTSADRTTVQAVASAIGRAIEDEARFGRIRDLEAKHFKKNYEEQLNKRVGHVLKHAFMQVVEADMLSKGLLGGEAWSSWHKEDSIHVGVRCIEMLIESTGMVSLHRQNAGVVGQDSETIELAPEYAEAIATRAGALAGISPMFQPCVVPPKPWTGITGGGYWANGRRPLALVRTHSKKGLMRYEDVYMPEVYKAINIAQNTAWSINKWVLAVANVITKWKHCPVEDIPAIEREELPMKPEDIDMNPEALTAWKRAKAAVYRKDKARKSRRILLEFMLEQANKFANHKAIWFPYNMDWRGRVYAVSMFNPQGNDMTKGLLTLAKGKPIGKEGYYWLKIHGANCAGVDKVPFPERIKFIEENHENIMACAKSPLENTWWAEQDSPFCFLAFCFEYAGVQHHGLSYNCSLPLAFDGSCSGIQHFSAMLRDEVGGRAVNLLPSETVQDIYGIVAKKVNEILQADAINGTDNEVVTVTDENTGEISEKVKLGTKALAGQWLAYGVTRSVTKRSVMTLAYGSKEFGFRQQVLRHTIQPAIDSGKGLMFTQPNQAAGYMAKLIWESVSVTVVAAVEAMNWLKSAAKLLAAEVKDKKTGEILRKRCAVHWVTPDGFPVWQEYKKPIQTRLNLMFLGQFRLQPTINTNKDSEIDAHKQESGIAPNFVHSQDGSHLRKTVVWAHEKYGIESFALIHDSFGTIPADAANLFKAVRETMVDTYESCDVLADFYDQFADQLHESQLDKMPALPAKGNLNLRDILESDFAFA

SEQ ID NO: 393 - DNA, 2670 bp, synthetic construct
  misc_feature 1..2670: note = Variant of RNA polymerase
  source 1..2670: mol_type = other DNA
atgcaccatcaccatcaccatatgaacacgattaacatcgctaagaacgacttctctgacatcgaactggctgctatcccgttcaacactctggctgaccattacggtgagggtttagctcgcgaacagttggcccttgagcatgagtcttacgagatgggtgaagcacgtttccgcaagatgtttgagcgtcaacttaaagctggtgaggttgcggataacgctgccgccaagcctctcatcactaccctactccctaagatgattgcacgcatcaacgactggtttgaggaagtgaaagctaagcgcggcaagcgcccgacagccttccagttcctgcaagaaatcaagccggaagccgtagcgtacatcaccattaagaccactctggcttgcctaaccagtgcggaccgtacaaccgttcaggctgtagcaagcgcaatcggtcgggccattgaggacgaggctcgcttcggtcgtatccgtgaccttgaagctaagcacttcctgaaaaacgttgaggaacaactcaacaagcgcgtagggcacgtctacaagaaagcatttatgcaagttgtcgaggctgacatgctctctaagggtctactcggtggcgaggcgtggtcttcgtggcataaggaagactctattcatgtaggagtacgctgcatcgagatgctcattgagtcaaccggaatggttagcttacaccgccaaaatgctggcgtagtaggtcaagactctgagactatcgaactcgcacctgaatacgctgaggctatcgcaacccgtgcaggtgcgctggctggcatctctccgatgttccaaccttgcgtagttcctcctaagccgtggactggcattactggtggtggctattgggctaacggtcgtcgtcctctggcgctggtgcgtactcacagtaagaaaggtctgatgcgctacgaagacgtttacatgcctgaggtgtacaaagcgattaacattgcgcaaaacaccgcctggtcgatcaacaagtgggtcctggcggtcgccaacgtaatcaccaagtggaagcattgtccggtcgaggacatccctgcgattgagcgtgaagaactcccgatgaaaccggaagacatcgacatgaatcctgaggctctcaccgcgtggaaacgtgctaaagctgctgtgtaccgcaaggacaaggctcgcaagtctcgccgtatcttgcttgagttcatgcttgagcaagccaataagtttgctaaccataaggccatctggttcccttacaacatggactggcgcggtcgtgtttacgctgtgtcaatgttcaacccgcaaggtaacgatatgaccaaaggactgcttacgctggcgaaaggtaaaccaatcggtaaggaaggttactactggctgaaaatccacggtgcaaactgtgcgggtgtcgataaggttccgttccctgagcgcatcaagttcattgaggaaaaccacgagaacatcatggcttgcgctaagtctccactggagaacacttggtgggctgagcaagatagtccgttctgcttccttgcgttctgctttgagtacgctggggtacagcaccacggcctgagctataactgctcccttccgctggcgtttgacgggtcttgctctggcatccagcacttctccgcgatgctccgagatgaggtaggtggtcgcgcggttaacttgcttcctagtgaaaccgttcaggacatctacgggattgttgctaagaaagtcaacgagattctacaagcagacgcaatcaatgggaccgataacgaagtagttaccgtgaccgatgagaacactggtgaaatctctgagaaagtcaagctgggcactaaggcactggctggtcaatggctggcttacggtgttactcgcagtgtgactaagcgttcagtcatgacgctggcttacgggtccaaagagttcggcttccgtcaacaagtgctgcgccacactattcagccagctattgattccggcaagggtctgatgttcactcagccgaatcaggctgctggatacatggctaagctgatttgggaatctgtgagcgtgacggtggtagctgcggttgaagcaatgaactggcttaagtctgctgctaagctgctggctgctgaggtcaaagataagaagactggagagattcttcgcaagcgttgcgctgtgcattgggtaactcctgatggtttccctgtgtggcaggaatacaagaagcctattcagacgcgcttgaacctgatgttcctcggtcagttccgcttacagcctaccattaacaccaacaaagatagcgagattgatgcacacaaacaggagtctggtatcgctcctaactttgtacacagccaagacggtagccaccttcgtaagactgtagtgtgggcacacgagaagtacggaatcgaatcttttgcactgattcacgactccttcggtaccattccggctgacgctgcgaacctgttcaaagcagtgcgcgaaactatggttgacacatatgagtcttgtgatgtactggctgatttctacgaccagttcgctgaccagttgcacgagtctcaattggacaaaatgccagcacttccggctaaaggtaacttgaacctccgtgacatcttagagtcggacttcgcgttcgcg

SEQ ID NO: 394 - protein, 890 aa, synthetic construct
  REGION 1..890: note = Variant of RNA polymerase
MHHHHHHMNTINIAKNDFSDIELAAIPFNTLADHYGEGLAREQLALEHESYEMGEARFRKMFERQLKAGEVADNAAAKPLITTLLPKMIARINDWFEEVKAKRGKRPTAFQFLQEIKPEAVAYITIKTTLACLTSADRTTVQAVASAIGRAIEDEARFGRIRDLEAKHFLKNVEEQLNKRVGHVYKKAFMQVVEADMLSKGLLGGEAWSSWHKEDSIHVGVRCIEMLIESTGMVSLHRQNAGVVGQDSETIELAPEYAEAIATRAGALAGISPMFQPCVVPPKPWTGITGGGYWANGRRPLALVRTHSKKGLMRYEDVYMPEVYKAINIAQNTAWSINKWVLAVANVITKWKHCPVEDIPAIEREELPMKPEDIDMNPEALTAWKRAKAAVYRKDKARKSRRILLEFMLEQANKFANHKAIWFPYNMDWRGRVYAVSMFNPQGNDMTKGLLTLAKGKPIGKEGYYWLKIHGANCAGVDKVPFPERIKFIEENHENIMACAKSPLENTWWAEQDSPFCFLAFCFEYAGVQHHGLSYNCSLPLAFDGSCSGIQHFSAMLRDEVGGRAVNLLPSETVQDIYGIVAKKVNEILQADAINGTDNEVVTVTDENTGEISEKVKLGTKALAGQWLAYGVTRSVTKRSVMTLAYGSKEFGFRQQVLRHTIQPAIDSGKGLMFTQPNQAAGYMAKLIWESVSVTVVAAVEAMNWLKSAAKLLAAEVKDKKTGEILRKRCAVHWVTPDGFPVWQEYKKPIQTRLNLMFLGQFRLQPTINTNKDSEIDAHKQESGIAPNFVHSQDGSHLRKTVVWAHEKYGIESFALIHDSFGTIPADAANLFKAVRETMVDTYESCDVLADFYDQFADQLHESQLDKMPALPAKGNLNLRDILESDFAFA

SEQ ID NO: 395 - DNA, 2670 bp, synthetic construct
  misc_feature 1..2670: note = Variant of RNA polymerase
  source 1..2670: mol_type = other DNA
atgcaccatcaccatcaccatatgaacacgattaacatcgctaagaacgacttctctgacatcgaactggctgctatcccgttcaacactctggctgaccattacggtgagggtttagctcgcgaacagttggcccttgagcatgagtcttacgagatgggtgaagcacgtttccgcaagatgtttgagcgtcaacttaaagctggtgaggttgcggataacgctgccgccaagcctctcatcactaccctactccctaagatgattgcacgcatcaacgactggtttgaggaagtgaaagctaagcgcggcaagcgcccgacagccttccagttcctgcaagaaatcaagccggaagccgtagcgtacatcaccattaagaccactctggcttgcctaaccagtgcggaccgtacaaccgttcaggctgtagcaagcgcaatcggtcgggccattgaggacgaggctcgcttcggtcgtatccgtgaccttgaagctaagcacttcaagaaaaacgttgaggaacaactcaacaagcgcgtagggcacgtcctgaagctggcatttatgcaagttgtcgaggctgacatgctctctaagggtctactcggtggcgaggcgtggtcttcgtggcataaggaagactctattcatgtaggagtacgctgcatcgagatgctcattgagtcaaccggaatggttagcttacaccgccaaaatgctggcgtagtaggtcaagactctgagactatcgaactcgcacctgaatacgctgaggctatcgcaacccgtgcaggtgcgctggctggcatctctccgatgttccaaccttgcgtagttcctcctaagccgtggactggcattactggtggtggctattgggctaacggtcgtcgtcctctggcgctggtgcgtactcacagtaagaaaggtctgatgcgctacgaagacgtttacatgcctgaggtgtacaaagcgattaacattgcgcaaaacaccgcctggtcgatcaacaagtgggtcctggcggtcgccaacgtaatcaccaagtggaagcattgtccggtcgaggacatccctgcgattgagcgtgaagaactcccgatgaaaccggaagacatcgacatgaatcctgaggctctcaccgcgtggaaacgtgctaaagctgctgtgtaccgcaaggacaaggctcgcaagtctcgccgtatcttgcttgagttcatgcttgagcaagccaataagtttgctaaccataaggccatctggttcccttacaacatggactggcgcggtcgtgtttacgctgtgtcaatgttcaacccgcaaggtaacgatatgaccaaaggactgcttacgctggcgaaaggtaaaccaatcggtaaggaaggttactactggctgaaaatccacggtgcaaactgtgcgggtgtcgataaggttccgttccctgagcgcatcaagttcattgaggaaaaccacgagaacatcatggcttgcgctaagtctccactggagaacacttggtgggctgagcaagatagtccgttctgcttccttgcgttctgctttgagtacgctggggtacagcaccacggcctgagctataactgctcccttccgctggcgtttgacgggtcttgctctggcatccagcacttctccgcgatgctccgagatgaggtaggtggtcgcgcggttaacttgcttcctagtgaaaccgttcaggacatctacgggattgttgctaagaaagtcaacgagattctacaagcagacgcaatcaatgggaccgataacgaagtagttaccgtgaccgatgagaacacgggtgaaatctctgagaaagtcaagctgggcactaaggcactggctggtcaatggctggcttacggtgttactcgcagtgtgactaagcgttcagtcatgacgctggcttacgggtccaaagagttcggcttccgtcaacaagtgctgcgccacactattcagccagctattgattccggcaagggtctgatgttcactcagccgaatcaggctgctggatacatggctaagctgatttgggaatctgtgagcgtgacggtggtagctgcggttgaagcaatgaactggcttaagtctgctgctaagctgctggctgctgaggtcaaagatgccaaaactggagagattcttcgcaagcgttgcgctgtgcattgggtaactcctgatggtttccctgtgtggcaggaatacaagaagcctattcagacgcgcttgaacctgatgttcctcggtcagttccgcttacagcctaccattaacaccaacaaagatagcgagattgatgcacacaaacaggagtctggtatcgctcctaactttgtacacagccaagacggtagccaccttcgtaagactgtagtgtgggcacacgagaagtacggaatcgaatcttttgcactgattcacgactccttcggtaccattccggctgacgctgcgaacctgttcaaagcagtgcgcgaaactatggttgacacatatgagtcttgtgatgtactggctgatttctacgaccagttcgctgaccagttgcacgagtctcaattggacaaaatgccagcacttccggctaaaggtaacttgaacctccgtgacatcttagagtcggacttcgcgttcgcg

SEQ ID NO: 396 - protein, 890 aa, synthetic construct
  REGION 1..890: note = Variant of RNA polymerase
MHHHHHHMNTINIAKNDFSDIELAAIPFNTLADHYGEGLAREQLALEHESYEMGEARFRKMFERQLKAGEVADNAAAKPLITTLLPKMIARINDWFEEVKAKRGKRPTAFQFLQEIKPEAVAYITIKTTLACLTSADRTTVQAVASAIGRAIEDEARFGRIRDLEAKHFKKNVEEQLNKRVGHVLKLAFMQVVEADMLSKGLLGGEAWSSWHKEDSIHVGVRCIEMLIESTGMVSLHRQNAGVVGQDSETIELAPEYAEAIATRAGALAGISPMFQPCVVPPKPWTGITGGGYWANGRRPLALVRTHSKKGLMRYEDVYMPEVYKAINIAQNTAWSINKWVLAVANVITKWKHCPVEDIPAIEREELPMKPEDIDMNPEALTAWKRAKAAVYRKDKARKSRRILLEFMLEQANKFANHKAIWFPYNMDWRGRVYAVSMFNPQGNDMTKGLLTLAKGKPIGKEGYYWLKIHGANCAGVDKVPFPERIKFIEENHENIMACAKSPLENTWWAEQDSPFCFLAFCFEYAGVQHHGLSYNCSLPLAFDGSCSGIQHFSAMLRDEVGGRAVNLLPSETVQDIYGIVAKKVNEILQADAINGTDNEVVTVTDENTGEISEKVKLGTKALAGQWLAYGVTRSVTKRSVMTLAYGSKEFGFRQQVLRHTIQPAIDSGKGLMFTQPNQAAGYMAKLIWESVSVTVVAAVEAMNWLKSAAKLLAAEVKDAKTGEILRKRCAVHWVTPDGFPVWQEYKKPIQTRLNLMFLGQFRLQPTINTNKDSEIDAHKQESGIAPNFVHSQDGSHLRKTVVWAHEKYGIESFALIHDSFGTIPADAANLFKAVRETMVDTYESCDVLADFYDQFADQLHESQLDKMPALPAKGNLNLRDILESDFAFA

SEQ ID NO: 397 - DNA, 2670 bp, synthetic construct
  misc_feature 1..2670: note = Variant of RNA polymerase
  source 1..2670: mol_type = other DNA
atgcaccatcaccatcaccatatgaacacgattaacatcgctaagaacgacttctctgacatcgaactggctgctatcccgttcaacactctggctgaccattacggtgagcgtttagctcgcgaacagttggcccttgagcatgagtcttacgagatgggtgaagcacgtttccgcaagatgtttgagcgtcaacttaaagctggtgaggttgcggataacgctgccgccaagcctctcatcactaccctactccctaagatgattgcacgcatcaacgactggtttgaggaagtgaaagctaagcgcggcaagcgcccgacagccttccagttcctgcaagaaatcaagccggaagccgtagcgtacatcaccattaagaccactctggcttgcctaaccagtgcggaccgtacaaccgttcaggctgtagcaagcgcaatcggtcgggccattgaggacgaggctcgcttcggtcgtatccgtgaccttgaagctaagcacttcctgaaaaactacgaggaacaactcaacaagcgcgtagggcacgtcctgaagcacgcatttatgcaagttgtcgaggctgacatgctctctaagggtctactcggtggcgaggcgtggtcttcgtggcataaggaagactctattcatgtaggagtacgctgcatcgagatgctcattgagtcaaccggaatggttagcttacaccgccaaaatgctggcgtagtaggtcaagactctgagactatcgaactcgcacctgaatacgctgaggctatcgcaacccgtgcaggtgcgctggctggcatctctccgatgttccaaccttgcgtagttcctcctaagccgtggactggcattactggtggtggctattgggctaacggtcgtcgtcctctggcgctggtgcgtactcacagtaagaaaggtctgatgcgctacgaagacgtttacatgcctgaggtgtacaaagcgattaacattgcgcaaaacaccgcctggtcgatcaacaagtgggtcctggcggtcgccaacgtaatcaccaagtggaagcattgtccggtcgaggacatccctgcgattgagcgtgaagaactcccgatgaaaccggaagacatcgacatgaatcctgaggctctcaccgcgtggaaacgtgctaaagctgctgtgtaccgcaaggacaaggctcgcaagtctcgccgtatcttgcttgagttcatgcttgagcaagccaataagtttgctaaccataaggccatctggttcccttacaacatggactggcgcggtcgtgtttacgctgtgtcaatgttcaacccgcaaggtaacgatatgaccaaaggactgcttacgctggcgaaaggtaaaccaatcggtaaggaaggttactactggctgaaaatccacggtgcaaactgtgcgggtgtcgataaggttccgttccctgagcgcatcaagttcattgaggaaaaccacgagaacatcatggcttgcgctaagtctccactggagaacacttggtgggctgagcaagatagtccgttctgcttccttgcgttctgctttgagtacgctggggtacagcaccacggcctgagctataactgctcccttccgctggcgtttgacgggtcttgctctggcatccagcacttctccgcgatgctccgagatgaggtaggtggtcgcgcggttaacttgcttcctagtgaaaccgttcaggacatctacgggattgttgctaagaaagtcaacgagattctacaagcagacgcaatcaatgggaccgataacgaagtagttaccgtgaccgatgagaactgcggtgaaatctctgagaaagtcaagctgggcactaaggcactggctggtcaatggctggcttacggtgttactcgcagtgtgactaagcgttcagtcatgacgctggcttacgggtccaaagagttcggcttccgtcaacaagtgctgcgccacactattcagccagctattgattccggcaagggtctgatgttcactcagccgaatcaggctgctggatacatggctaagctgatttgggaatctgtgagcgtgacggtggtagctgcggttgaagcaatgaactggcttaagtctgctgctaagctgctggctgctgaggtcaaagataagaaaactggagagattcttcgcaagcgttgcgctgtgcattgggtaactcctgatggtttccctgtgtggcaggaatacaagaagcctattcagacgcgcttgaacctgatgttcctcggtcagttccgcttacagcctaccattaacaccaacaaagatagcgagattgatgcacacaaacaggagtctggtatcgctcctaactttgtacacagccaagacggtagccaccttcgtaagactgtagtgtgggcacacgagaagtacggaatcgaatcttttgcactgattcacgactccttcggtaccattccggctgacgctgcgaacctgttcaaagcagtgcgcgaaactatggttgacacatatgagtcttgtgatgtactggctgatttctacgaccagttcgctgaccagttgcacgagtctcaattggacaaaatgccagcacttccggctaaaggtaacttgaacctccgtgacatcttagagtcggacttcgcgttcgcg

SEQ ID NO: 398 - protein, 890 aa, synthetic construct
  REGION 1..890: note = Variant of RNA polymerase
MHHHHHHMNTINIAKNDFSDIELAAIPFNTLADHYGERLAREQLALEHESYEMGEARFRKMFERQLKAGEVADNAAAKPLITTLLPKMIARINDWFEEVKAKRGKRPTAFQFLQEIKPEAVAYITIKTTLACLTSADRTTVQAVASAIGRAIEDEARFGRIRDLEAKHFLKNYEEQLNKRVGHVLKHAFMQVVEADMLSKGLLGGEAWSSWHKEDSIHVGVRCIEMLIESTGMVSLHRQNAGVVGQDSETIELAPEYAEAIATRAGALAGISPMFQPCVVPPKPWTGITGGGYWANGRRPLALVRTHSKKGLMRYEDVYMPEVYKAINIAQNTAWSINKWVLAVANVITKWKHCPVEDIPAIEREELPMKPEDIDMNPEALTAWKRAKAAVYRKDKARKSRRILLEFMLEQANKFANHKAIWFPYNMDWRGRVYAVSMFNPQGNDMTKGLLTLAKGKPIGKEGYYWLKIHGANCAGVDKVPFPERIKFIEENHENIMACAKSPLENTWWAEQDSPFCFLAFCFEYAGVQHHGLSYNCSLPLAFDGSCSGIQHFSAMLRDEVGGRAVNLLPSETVQDIYGIVAKKVNEILQADAINGTDNEVVTVTDENCGEISEKVKLGTKALAGQWLAYGVTRSVTKRSVMTLAYGSKEFGFRQQVLRHTIQPAIDSGKGLMFTQPNQAAGYMAKLIWESVSVTVVAAVEAMNWLKSAAKLLAAEVKDKKTGEILRKRCAVHWVTPDGFPVWQEYKKPIQTRLNLMFLGQFRLQPTINTNKDSEIDAHKQESGIAPNFVHSQDGSHLRKTVVWAHEKYGIESFALIHDSFGTIPADAANLFKAVRETMVDTYESCDVLADFYDQFADQLHESQLDKMPALPAKGNLNLRDILESDFAFA

SEQ ID NO: 399 - DNA, 2670 bp, synthetic construct
  misc_feature 1..2670: note = Variant of RNA polymerase
  source 1..2670: mol_type = other DNA
atgcaccatcaccatcaccatatgaacacgattaacatcgctaagaacgacttctctgacatcgaactggctgctatcccgttcaacactctggctgaccattacggtgagcgtttagctcgcgaacagttggcccttgagcatgagtcttacgagatgggtgaagcacgtttccgcaagatgtttgagcgtcaacttaaagctggtgaggttgcggataacgctgccgccaagcctctcatcactaccctactccctaagatgattgcacgcatcaacgactggtttgaggaagtgaaagctaagcgcggcaagcgcccgacagccttccagttcctgcaagaaatcaagccggaagccgtagcgtacatcaccattaagaccactctggcttgcctaaccagtgcggaccgtacaaccgttcaggctgtagcaagcgcaatcggtcgggccattgaggacgaggctcgcttcggtcgtatccgtgaccttgaagctaagcacttcaagaaaaactatgaggaacaactcaacaagcgcgtagggcacgtctacaagaaagcatttatgcaagttgtcgaggctgacatgctctctaagggtctactcggtggcgaggcgtggtcttcgtggcataaggaagactctattcatgtaggagtacgctgcatcgagatgctcattgagtcaaccggaatggttagcttacaccgccaaaatgctggcgtagtaggtcaagactctgagactatcgaactcgcacctgaatacgctgaggctatcgcaacccgtgcaggtgcgctggctggcatctctccgatgttccaaccttgcgtagttcctcctaagccgtggactggcattactggtggtggctattgggctaacggtcgtcgtcctctggcgctggtgcgtactcacagtaagaaaggtctgatgcgctacgaagacgtttacatgcctgaggtgtacaaagcgattaacattgcgcaaaacaccgcctggtcgatcaacaagtgggtcctggcggtcgccaacgtaatcaccaagtggaagcattgtccggtcgaggacatccctgcgattgagcgtgaagaactcccgatgaaaccggaagacatcgacatgaatcctgaggctctcaccgcgtggaaacgtgctaaagctgctgtgtaccgcaaggacaaggctcgcaagtctcgccgtatcttgcttgagttcatgcttgagcaagccaataagtttgctaaccataaggccatctggttcccttacaacatggactggcgcggtcgtgtttacgctgtgtcaatgttcaacccgcaaggtaacgatatgaccaaaggactgcttacgctggcgaaaggtaaaccaatcggtaaggaaggttactactggctgaaaatccacggtgcaaactgtgcgggtgtcgataaggttccgttccctgagcgcatcaagttcattgaggaaaaccacgagaacatcatggcttgcgctaagtctccactggagaacacttggtgggctgagcaagatagtccgttctgcttccttgcgttctgctttgagtacgctggggtacagcaccacggcctgagctataactgctcccttccgctggcgtttgacgggtcttgctctggcatccagcacttctccgcgatgctccgagatgaggtaggtggtcgcgcggttaacttgcttcctagtgaaaccgttcaggacatctacgggattgttgctaagaaagtcaacgagattctacaagcagacgcaatcaatgggaccgataacgaagtagttaccgtgaccgatgagaacgaaggtgaaatctctgagaaagtcaagctgggcactaaggcactggctggtcaatggctggcttacggtgttactcgcagtgtgactaagcgttcagtcatgacgctggcttacgggtccaaagagttcggcttccgtcaacaagtgctgcgccacactattcagccagctattgattccggcaagggtctgatgttcactcagccgaatcaggctgctggatacatggctaagctgatttgggaatctgtgagcgtgacggtggtagctgcggttgaagcaatgaactggcttaagtctgctgctaagctgctggctgctgaggtcaaagataagaagactggagagattcttcgcaagcgttgcgctgtgcattgggtaactcctgatggtttccctgtgtggcaggaatacaagaagcctattcagacgcgcttgaacctgatgttcctcggtcagttccgcttacagcctaccattaacaccaacaaagatagcgagattgatgcacacaaacaggagtctggtatcgctcctaactttgtacacagccaagacggtagccaccttcgtaagactgtagtgtgggcacacgagaagtacggaatcgaatcttttgcactgattcacgactccttcggtaccattccggctgacgctgcgaacctgttcaaagcagtgcgcgaaactatggttgacacatatgagtcttgtgatgtactggctgatttctacgaccagttcgctgaccagttgcacgagtctcaattggacaaaatgccagcacttccggctaaaggtaacttgaacctccgtgacatcttagagtcggacttcgcgttcgcg

SEQ ID NO: 400 - protein, 890 aa, synthetic construct
  REGION 1..890: note = Variant of RNA polymerase
MHHHHHHMNTINIAKNDFSDIELAAIPFNTLADHYGERLAREQLALEHESYEMGEARFRKMFERQLKAGEVADNAAAKPLITTLLPKMIARINDWFEEVKAKRGKRPTAFQFLQEIKPEAVAYITIKTTLACLTSADRTTVQAVASAIGRAIEDEARFGRIRDLEAKHFKKNYEEQLNKRVGHVYKKAFMQVVEADMLSKGLLGGEAWSSWHKEDSIHVGVRCIEMLIESTGMVSLHRQNAGVVGQDSETIELAPEYAEAIATRAGALAGISPMFQPCVVPPKPWTGITGGGYWANGRRPLALVRTHSKKGLMRYEDVYMPEVYKAINIAQNTAWSINKWVLAVANVITKWKHCPVEDIPAIEREELPMKPEDIDMNPEALTAWKRAKAAVYRKDKARKSRRILLEFMLEQANKFANHKAIWFPYNMDWRGRVYAVSMFNPQGNDMTKGLLTLAKGKPIGKEGYYWLKIHGANCAGVDKVPFPERIKFIEENHENIMACAKSPLENTWWAEQDSPFCFLAFCFEYAGVQHHGLSYNCSLPLAFDGSCSGIQHFSAMLRDEVGGRAVNLLPSETVQDIYGIVAKKVNEILQADAINGTDNEVVTVTDENEGEISEKVKLGTKALAGQWLAYGVTRSVTKRSVMTLAYGSKEFGFRQQVLRHTIQPAIDSGKGLMFTQPNQAAGYMAKLIWESVSVTVVAAVEAMNWLKSAAKLLAAEVKDKKTGEILRKRCAVHWVTPDGFPVWQEYKKPIQTRLNLMFLGQFRLQPTINTNKDSEIDAHKQESGIAPNFVHSQDGSHLRKTVVWAHEKYGIESFALIHDSFGTIPADAANLFKAVRETMVDTYESCDVLADFYDQFADQLHESQLDKMPALPAKGNLNLRDILESDFAFA

SEQ ID NO: 401 - DNA, 2670 bp, synthetic construct
  misc_feature 1..2670: note = Variant of RNA polymerase
  source 1..2670: mol_type = other DNA
atgcaccatcaccatcaccatatgaacacgattaacatcgctaagaacgacttctctgacatcgaactggctgctatcccgttcaacactctggctgaccattacggtgagcgtttagctcgcgaacagttggcccttgagcatgagtcttacgagatgggtgaagcacgtttccgcaagatgtttgagcgtcaacttaaagctggtgaggttgcggataacgctgccgccaagcctctcatcactaccctactccctaagatgattgcacgcatcaacgactggtttgaggaagtgaaagctaagcgcggcaagcgcccgacagccttccagttcctgcaagaaatcaagccggaagccgtagcgtacatcaccattaagaccactctggcttgcctaaccagtgcggaccgtacaaccgttcaggctgtagcaagcgcaatcggtcgggccattgaggacgaggctcgcttcggtcgtatccgtgaccttgaagctaagcacttcctgaaaaactacgaggaacaactcaacaagcgcgtagggcacgtcctgaagcacgcatttatgcaagttgtcgaggctgacatgctctctaagggtctactcggtggcgaggcgtggtcttcgtggcataaggaagactctattcatgtaggagtacgctgcatcgagatgctcattgagtcaaccggaatggttagcttacaccgccaaaatgctggcgtagtaggtcaagactctgagactatcgaactcgcacctgaatacgctgaggctatcgcaacccgtgcaggtgcgctggctggcatctctccgatgttccaaccttgcgtagttcctcctaagccgtggactggcattactggtggtggctattgggctaacggtcgtcgtcctctggcgctggtgcgtactcacagtaagaaaggtctgatgcgctacgaagacgtttacatgcctgaggtgtacaaagcgattaacattgcgcaaaacaccgcctggtcgatcaacaagtgggtcctggcggtcgccaacgtaatcaccaagtggaagcattgtccggtcgaggacatccctgcgattgagcgtgaagaactcccgatgaaaccggaagacatcgacatgaatcctgaggctctcaccgcgtggaaacgtgctaaagctgctgtgtaccgcaaggacaaggctcgcaagtctcgccgtatcttgcttgagttcatgcttgagcaagccaataagtttgctaaccataaggccatctggttcccttacaacatggactggcgcggtcgtgtttacgctgtgtcaatgttcaacccgcaaggtaacgatatgaccaaaggactgcttacgctggcgaaaggtaaaccaatcggtaaggaaggttactactggctgaaaatccacggtgcaaactgtgcgggtgtcgataaggttccgttccctgagcgcatcaagttcattgaggaaaaccacgagaacatcatggcttgcgctaagtctccactggagaacacttggtgggctgagcaagatagtccgttctgcttccttgcgttctgctttgagtacgctggggtacagcaccacggcctgagctataactgctcccttccgctggcgtttgacgggtcttgctctggcatccagcacttctccgcgatgctccgagatgaggtaggtggtcgcgcggttaacttgcttcctagtgaaaccgttcaggacatctacgggattgttgctaagaaagtcaacgagattctacaagcagacgcaatcaatgggaccgataacgaagtagttaccgtgaccgatgagaactgcggtgaaatctctgagaaagtcaagctgggcactaaggcactggctggtcaatggctggcttacggtgttactcgcagtgtgactaagcgttcagtcatgacgctggcttacgggtccaaagagttcggcttccgtcaacaagtgctgcgccacactattcagccagctattgattccggcaagggtctgatgttcactcagccgaatcaggctgctggatacatggctaagctgatttgggaatctgtgagcgtgacggtggtagctgcggttgaagcaatgaactggcttaagtctgctgctaagctgctggctgctgaggtcaaagataagagcactggagagattcttcgcaagcgttgcgctgtgcattgggtaactcctgatggtttccctgtgtggcaggaatacaagaagcctattcagacgcgcttgaacctgatgttcctcggtcagttccgcttacagcctaccattaacaccaacaaagatagcgagattgatgcacacaaacaggagtctggtatcgctcctaactttgtacacagccaagacggtagccaccttcgtaagactgtagtgtgggcacacgagaagtacggaatcgaatcttttgcactgattcacgactccttcggtaccattccggctgacgctgcgaacctgttcaaagcagtgcgcgaaactatggttgacacatatgagtcttgtgatgtactggctgatttctacgaccagttcgctgaccagttgcacgagtctcaattggacaaaatgccagcacttccggctaaaggtaacttgaacctccgtgacatcttagagtcggacttcgcgttcgcg

SEQ ID NO: 402 - protein, 890 aa, synthetic construct
  REGION 1..890: note = Variant of RNA polymerase
MHHHHHHMNTINIAKNDFSDIELAAIPFNTLADHYGERLAREQLALEHESYEMGEARFRKMFERQLKAGEVADNAAAKPLITTLLPKMIARINDWFEEVKAKRGKRPTAFQFLQEIKPEAVAYITIKTTLACLTSADRTTVQAVASAIGRAIEDEARFGRIRDLEAKHFLKNYEEQLNKRVGHVLKHAFMQVVEADMLSKGLLGGEAWSSWHKEDSIHVGVRCIEMLIESTGMVSLHRQNAGVVGQDSETIELAPEYAEAIATRAGALAGISPMFQPCVVPPKPWTGITGGGYWANGRRPLALVRTHSKKGLMRYEDVYMPEVYKAINIAQNTAWSINKWVLAVANVITKWKHCPVEDIPAIEREELPMKPEDIDMNPEALTAWKRAKAAVYRKDKARKSRRILLEFMLEQANKFANHKAIWFPYNMDWRGRVYAVSMFNPQGNDMTKGLLTLAKGKPIGKEGYYWLKIHGANCAGVDKVPFPERIKFIEENHENIMACAKSPLENTWWAEQDSPFCFLAFCFEYAGVQHHGLSYNCSLPLAFDGSCSGIQHFSAMLRDEVGGRAVNLLPSETVQDIYGIVAKKVNEILQADAINGTDNEVVTVTDENCGEISEKVKLGTKALAGQWLAYGVTRSVTKRSVMTLAYGSKEFGFRQQVLRHTIQPAIDSGKGLMFTQPNQAAGYMAKLIWESVSVTVVAAVEAMNWLKSAAKLLAAEVKDKSTGEILRKRCAVHWVTPDGFPVWQEYKKPIQTRLNLMFLGQFRLQPTINTNKDSEIDAHKQESGIAPNFVHSQDGSHLRKTVVWAHEKYGIESFALIHDSFGTIPADAANLFKAVRETMVDTYESCDVLADFYDQFADQLHESQLDKMPALPAKGNLNLRDILESDFAFA

SEQ ID NO: 403 - DNA, 2670 bp, synthetic construct
  misc_feature 1..2670: note = Variant of RNA polymerase
  source 1..2670: mol_type = other DNA
atgcaccatcaccatcaccatatgaacacgattaacatcgctaagaacgacttctctgacatcgaactggctgctatcccgttcaacactctggctgaccattacggtgagggtttagctcgcgaacagttggcccttgagcatgagtcttacgagatgggtgaagcacgtttccgcaagatgtttgagcgtcaacttaaagctggtgaggttgcggataacgctgccgccaagcctctcatcactaccctactccctaagatgattgcacgcatcaacgactggtttgaggaagtgaaagctaagcgcggcaagcgcccgacagccttccagttcctgcaagaaatcaagccggaagccgtagcgtacatcaccattaagaccactctggcttgcctaaccagtgcggaccgtacaaccgttcaggctgtagcaagcgcaatcggtcgggccattgaggacgaggctcgcttcggtcgtatccgtgaccttgaagctaagcacttcaagaaaaactacgaggaacaactcaacaagcgcgtagggcacgtctacaagaaagcatttatgcaagttgtcgaggctgacatgctctctaagggtctactcggtggcgaggcgtggtcttcgtggcataaggaagactctattcatgtaggagtacgctgcatcgagatgctcattgagtcaaccggaatggttagcttacaccgccaaaatgctggcgtagtaggtcaagactctgagactatcgaactcgcacctgaatacgctgaggctatcgcaacccgtgcaggtgcgctggctggcatctctccgatgttccaaccttgcgtagttcctcctaagccgtggactggcattactggtggtggctattgggctaacggtcgtcgtcctctggcgctggtgcgtactcacagtaagaaaggtctgatgcgctacgaagacgtttacatgcctgaggtgtacaaagcgattaacattgcgcaaaacaccgcctggtcgatcaacaagtgggtcctggcggtcgccaacgtaatcaccaagtggaagcattgtccggtcgaggacatccctgcgattgagcgtgaagaactcccgatgaaaccggaagacatcgacatgaatcctgaggctctcaccgcgtggaaacgtgctaaagctgctgtgtaccgcaaggacaaggctcgcaagtctcgccgtatcttgcttgagttcatgcttgagcaagccaataagtttgctaaccataaggccatctggttcccttacaacatggactggcgcggtcgtgtttacgctgtgtcaatgttcaacccgcaaggtaacgatatgaccaaaggactgcttacgctggcgaaaggtaaaccaatcggtaaggaaggttactactggctgaaaatccacggtgcaaactgtgcgggtgtcgataaggttccgttccctgagcgcatcaagttcattgaggaaaaccacgagaacatcatggcttgcgctaagtctccactggagaacacttggtgggctgagcaagatagtccgttctgcttccttgcgttctgctttgagtacgctggggtacagcaccacggcctgagctataactgctcccttccgctggcgtttgacgggtcttgctctggcatccagcacttctccgcgatgctccgagatgaggtaggtggtcgcgcggttaacttgcttcctagtgaaaccgttcaggacatctacgggattgttgctaagaaagtcaacgagattctacaagcagacgcaatcaatgggaccgataacgaagtagttaccgtgaccgatgagaacgaaggtgaaatctctgagaaagtcaagctgggcactaaggcactggctggtcaatggctggcttacggtgttactcgcagtgtgactaagcgttcagtcatgacgctggcttacgggtccaaagagttcggcttccgtcaacaagtgctgcgccacactattcagccagctattgattccggcaagggtctgatgttcactcagccgaatcaggctgctggatacatggctaagctgatttgggaatctgtgagcgtgacggtggtagctgcggttgaagcaatgaactggcttaagtctgctgctaagctgctggctgctgaggtcaaagataagaaaactggagagattcttcgcaagcgttgcgctgtgcattgggtaactcctgatggtttccctgtgtggcaggaatacaagaagcctattcagacgcgcttgaacctgatgttcctcggtcagttccgcttacagcctaccattaacaccaacaaagatagcgagattgatgcacacaaacaggagtctggtatcgctcctaactttgtacacagccaagacggtagccaccttcgtaagactgtagtgtgggcacacgagaagtacggaatcgaatcttttgcactgattcacgactccttcggtaccattccggctgacgctgcgaacctgttcaaagcagtgcgcgaaactatggttgacacatatgagtcttgtgatgtactggctgatttctacgaccagttcgctgaccagttgcacgagtctcaattggacaaaatgccagcacttccggctaaaggtaacttgaacctccgtgacatcttagagtcggacttcgcgttcgcg

SEQ ID NO: 404 - protein, 890 aa, synthetic construct
  REGION 1..890: note = Variant of RNA polymerase
MHHHHHHMNTINIAKNDFSDIELAAIPFNTLADHYGEGLAREQLALEHESYEMGEARFRKMFERQLKAGEVADNAAAKPLITTLLPKMIARINDWFEEVKAKRGKRPTAFQFLQEIKPEAVAYITIKTTLACLTSADRTTVQAVASAIGRAIEDEARFGRIRDLEAKHFKKNYEEQLNKRVGHVYKKAFMQVVEADMLSKGLLGGEAWSSWHKEDSIHVGVRCIEMLIESTGMVSLHRQNAGVVGQDSETIELAPEYAEAIATRAGALAGISPMFQPCVVPPKPWTGITGGGYWANGRRPLALVRTHSKKGLMRYEDVYMPEVYKAINIAQNTAWSINKWVLAVANVITKWKHCPVEDIPAIEREELPMKPEDIDMNPEALTAWKRAKAAVYRKDKARKSRRILLEFMLEQANKFANHKAIWFPYNMDWRGRVYAVSMFNPQGNDMTKGLLTLAKGKPIGKEGYYWLKIHGANCAGVDKVPFPERIKFIEENHENIMACAKSPLENTWWAEQDSPFCFLAFCFEYAGVQHHGLSYNCSLPLAFDGSCSGIQHFSAMLRDEVGGRAVNLLPSETVQDIYGIVAKKVNEILQADAINGTDNEVVTVTDENEGEISEKVKLGTKALAGQWLAYGVTRSVTKRSVMTLAYGSKEFGFRQQVLRHTIQPAIDSGKGLMFTQPNQAAGYMAKLIWESVSVTVVAAVEAMNWLKSAAKLLAAEVKDKKTGEILRKRCAVHWVTPDGFPVWQEYKKPIQTRLNLMFLGQFRLQPTINTNKDSEIDAHKQESGIAPNFVHSQDGSHLRKTVVWAHEKYGIESFALIHDSFGTIPADAANLFKAVRETMVDTYESCDVLADFYDQFADQLHESQLDKMPALPAKGNLNLRDILESDFAFA

SEQ ID NO: 405 - DNA, 2670 bp, synthetic construct
  misc_feature 1..2670: note = Variant of RNA polymerase
  source 1..2670: mol_type = other DNA
atgcaccatcaccatcaccatatgaacacgattaacatcgctaagaacgacttctctgacatcgaactggctgctatcccgttcaacactctggctgaccattacggtgagcgtttagctcgcgaacagttggcccttgagcatgagtcttacgagatgggtgaagcacgtttccgcaagatgtttgagcgtcaacttaaagctggtgaggttgcggataacgctgccgccaagcctctcatcactaccctactccctaagatgattgcacgcatcaacgactggtttgaggaagtgaaagctaagcgcggcaagcgcccgacagccttccagttcctgcaagaaatcaagccggaagccgtagcgtacatcaccattaagaccactctggcttgcctaaccagtgcggaccgtacaaccgttcaggctgtagcaagcgcaatcggtcgggccattgaggacgaggctcgcttcggtcgtatccgtgaccttgaagctaagcacttcctgaaaaactacgaggaacaactcaacaagcgcgtagggcacgtcctgaagctggcatttatgcaagttgtcgaggctgacatgctctctaagggtctactcggtggcgaggcgtggtcttcgtggcataaggaagactctattcatgtaggagtacgctgcatcgagatgctcattgagtcaaccggaatggttagcttacaccgccaaaatgctggcgtagtaggtcaagactctgagactatcgaactcgcacctgaatacgctgaggctatcgcaacccgtgcaggtgcgctggctggcatctctccgatgttccaaccttgcgtagttcctcctaagccgtggactggcattactggtggtggctattgggctaacggtcgtcgtcctctggcgctggtgcgtactcacagtaagaaaggtctgatgcgctacgaagacgtttacatgcctgaggtgtacaaagcgattaacattgcgcaaaacaccgcctggtcgatcaacaagtgggtcctggcggtcgccaacgtaatcaccaagtggaagcattgtccggtcgaggacatccctgcgattgagcgtgaagaactcccgatgaaaccggaagacatcgacatgaatcctgaggctctcaccgcgtggaaacgtgctaaagctgctgtgtaccgcaaggacaaggctcgcaagtctcgccgtatcttgcttgagttcatgcttgagcaagccaataagtttgctaaccataaggccatctggttcccttacaacatggactggcgcggtcgtgtttacgctgtgtcaatgttcaacccgcaaggtaacgatatgaccaaaggactgcttacgctggcgaaaggtaaaccaatcggtaaggaaggttactactggctgaaaatccacggtgcaaactgtgcgggtgtcgataaggttccgttccctgagcgcatcaagttcattgaggaaaaccacgagaacatcatggcttgcgctaagtctccactggagaacacttggtgggctgagcaagatagtccgttctgcttccttgcgttctgctttgagtacgctggggtacagcaccacggcctgagctataactgctcccttccgctggcgtttgacgggtcttgctctggcatccagcacttctccgcgatgctccgagatgaggtaggtggtcgcgcggttaacttgcttcctagtgaaaccgttcaggacatctacgggattgttgctaagaaagtcaacgagattctacaagcagacgcaatcaatgggaccgataacgaagtagttaccgtgaccgatgagaacgaaggtgaaatctctgagaaagtcaagctgggcactaaggcactggctggtcaatggctggcttacggtgttactcgcagtgtgactaagcgttcagtcatgacgctggcttacgggtccaaagagttcggcttccgtcaacaagtgctgcgccacactattcagccagctattgattccggcaagggtctgatgttcactcagccgaatcaggctgctggatacatggctaagctgatttgggaatctgtgagcgtgacggtggtagctgcggttgaagcaatgaactggcttaagtctgctgctaagctgctggctgctgaggtcaaagataagaaaactggagagattcttcgcaagcgttgcgctgtgcattgggtaactcctgatggtttccctgtgtggcaggaatacaagaagcctattcagacgcgcttgaacctgatgttcctcggtcagttccgcttacagcctaccattaacaccaacaaagatagcgagattgatgcacacaaacaggagtctggtatcgctcctaactttgtacacagccaagacggtagccaccttcgtaagactgtagtgtgggcacacgagaagtacggaatcgaatcttttgcactgattcacgactccttcggtaccattccggctgacgctgcgaacctgttcaaagcagtgcgcgaaactatggttgacacatatgagtcttgtgatgtactggctgatttctacgaccagttcgctgaccagttgcacgagtctcaattggacaaaatgccagcacttccggctaaaggtaacttgaacctccgtgacatcttagagtcggacttcgcgttcgcg

SEQ ID NO: 406 - protein, 890 aa, synthetic construct
  REGION 1..890: note = Variant of RNA polymerase
MHHHHHHMNTINIAKNDFSDIELAAIPFNTLADHYGERLAREQLALEHESYEMGEARFRKMFERQLKAGEVADNAAAKPLITTLLPKMIARINDWFEEVKAKRGKRPTAFQFLQEIKPEAVAYITIKTTLACLTSADRTTVQAVASAIGRAIEDEARFGRIRDLEAKHFLKNYEEQLNKRVGHVLKLAFMQVVEADMLSKGLLGGEAWSSWHKEDSIHVGVRCIEMLIESTGMVSLHRQNAGVVGQDSETIELAPEYAEAIATRAGALAGISPMFQPCVVPPKPWTGITGGGYWANGRRPLALVRTHSKKGLMRYEDVYMPEVYKAINIAQNTAWSINKWVLAVANVITKWKHCPVEDIPAIEREELPMKPEDIDMNPEALTAWKRAKAAVYRKDKARKSRRILLEFMLEQANKFANHKAIWFPYNMDWRGRVYAVSMFNPQGNDMTKGLLTLAKGKPIGKEGYYWLKIHGANCAGVDKVPFPERIKFIEENHENIMACAKSPLENTWWAEQDSPFCFLAFCFEYAGVQHHGLSYNCSLPLAFDGSCSGIQHFSAMLRDEVGGRAVNLLPSETVQDIYGIVAKKVNEILQADAINGTDNEVVTVTDENEGEISEKVKLGTKALAGQWLAYGVTRSVTKRSVMTLAYGSKEFGFRQQVLRHTIQPAIDSGKGLMFTQPNQAAGYMAKLIWESVSVTVVAAVEAMNWLKSAAKLLAAEVKDKKTGEILRKRCAVHWVTPDGFPVWQEYKKPIQTRLNLMFLGQFRLQPTINTNKDSEIDAHKQESGIAPNFVHSQDGSHLRKTVVWAHEKYGIESFALIHDSFGTIPADAANLFKAVRETMVDTYESCDVLADFYDQFADQLHESQLDKMPALPAKGNLNLRDILESDFAFA

SEQ ID NO: 407 - DNA, 2670 bp, synthetic construct
  misc_feature 1..2670: note = Variant of RNA polymerase
  source 1..2670: mol_type = other DNA
atgcaccatcaccatcaccatatgaacacgattaacatcgctaagaacgacttctctgacatcgaactggctgctatcccgttcaacactctggctgaccattacggtgagggtttagctcgcgaacagttggcccttgagcatgagtcttacgagatgggtgaagcacgtttccgcaagatgtttgagcgtcaacttaaagctggtgaggttgcggataacgctgccgccaagcctctcatcactaccctactccctaagatgattgcacgcatcaacgactggtttgaggaagtgaaagctaagcgcggcaagcgcccgacagccttccagttcctgcaagaaatcaagccggaagccgtagcgtacatcaccattaagaccactctggcttgcctaaccagtgcggaccgtacaaccgttcaggctgtagcaagcgcaatcggtcgggccattgaggacgaggctcgcttcggtcgtatccgtgaccttgaagctaagcacttcctgaaaaactacgaggaacaactcaacaagcgcgtagggcacgtctacaagaaagcatttatgcaagttgtcgaggctgacatgctctctaagggtctactcggtggcgaggcgtggtcttcgtggcataaggaagactctattcatgtaggagtacgctgcatcgagatgctcattgagtcaaccggaatggttagcttacaccgccaaaatgctggcgtagtaggtgttgactctgagactatcgaactcgcacctgaatacgctgaggctatcgcaacccgtgcaggtgcgctggctggcatctctccgatgttccaaccttgcgtagttcctcctaagccgtggactggcattactggtggtggctattgggctaacggtcgtcgtcctctggcgctggtgcgtactcacagtaagaaaggtctgatgcgctacgaagacgtttacatgcctgaggtgtacaaagcgattaacattgcgcaaaacaccgcctggtcgatcaacaagtgggtcctggcggtcgccaacgtaatcaccaagtggaagcattgtccggtcgaggacatccctgcgattgagcgtgaagaactcccgatgaaaccggaagacatcgacatgaatcctgaggctctcaccgcgtggaaacgtgctaaagctgctgtgtaccgcaaggacaaggctcgcaagtctcgccgtatcttgcttgagttcatgcttgagcaagccaataagtttgctaaccataaggccatctggttcccttacaacatggactggcgcggtcgtgtttacgctgtgtcaatgttcaacccgcaaggtaacgatatgaccaaaggactgcttacgctggcgaaaggtaaaccaatcggtaaggaaggttactactggctgaaaatccacggtgcaaactgtgcgggtgtcgataaggttccgttccctgagcgcatcaagttcattgaggaaaaccacgagaacatcatggcttgcgctaagtctccactggagaacacttggtgggctgagcaagatagtccgttctgcttccttgcgttctgctttgagtacgctggggtacagcaccacggcctgagctataactgctcccttccgctggcgtttgacgggtcttgctctggcatccagcacttctccgcgatgctccgagatgaggtaggtggtcgcgcggttaacttgcttcctagtgaaaccgttcaggacatctacgggattgttgctaagaaagtcaacgagattctacaagcagacgcaatcaatgggaccgataacgaagtagttaccgtgaccgatgagaacccgggtgaaatctctgagaaagtcaagctgggcactaaggcactggctggtcaatggctggcttacggtgttactcgcagtgtgactaagcgttcagtcatgacgctggcttacgggtccaaagagttcggcttccgtcaacaagtgctgcgccacactattcagccagctattgattccggcaagggtctgatgttcactcagccgaatcaggctgctggatacatggctaagctgatttgggaatctgtgagcgtgacggtggtagctgcggttgaagcaatgaactggcttaagtctgctgctaagctgctggctgctgaggtcaaagataagaaaactggagagattcttcgcaagcgttgcgctgtgcattgggtaactcctgatggtttccctgtgtggcaggaatacaagaagcctattcagacgcgcttgaacctgatgttcctcggtcagttccgcttacagcctaccattaacaccaacaaagatagcgagattgatgcacacaaacaggagtctggtatcgctcctaactttgtacacagccaagacggtagccaccttcgtaagactgtagtgtgggcacacgagaagtacggaatcgaatcttttgcactgattcacgactccttcggtaccattccggctgacgctgcgaacctgttcaaagcagtgcgcgaaactatggttgacacatatgagtcttgtgatgtactggctgatttctacgaccagttcgctgaccagttgcacgagtctcaattggacaaaatgccagcacttccggctaaaggtaacttgaacctccgtgacatcttagagtcggacttcgcgttcgcg

SEQ ID NO: 408 - protein, 890 aa, synthetic construct
  REGION 1..890: note = Variant of RNA polymerase
MHHHHHHMNTINIAKNDFSDIELAAIPFNTLADHYGEGLAREQLALEHESYEMGEARFRKMFERQLKAGEVADNAAAKPLITTLLPKMIARINDWFEEVKAKRGKRPTAFQFLQEIKPEAVAYITIKTTLACLTSADRTTVQAVASAIGRAIEDEARFGRIRDLEAKHFLKNYEEQLNKRVGHVYKKAFMQVVEADMLSKGLLGGEAWSSWHKEDSIHVGVRCIEMLIESTGMVSLHRQNAGVVGVDSETIELAPEYAEAIATRAGALAGISPMFQPCVVPPKPWTGITGGGYWANGRRPLALVRTHSKKGLMRYEDVYMPEVYKAINIAQNTAWSINKWVLAVANVITKWKHCPVEDIPAIEREELPMKPEDIDMNPEALTAWKRAKAAVYRKDKARKSRRILLEFMLEQANKFANHKAIWFPYNMDWRGRVYAVSMFNPQGNDMTKGLLTLAKGKPIGKEGYYWLKIHGANCAGVDKVPFPERIKFIEENHENIMACAKSPLENTWWAEQDSPFCFLAFCFEYAGVQHHGLSYNCSLPLAFDGSCSGIQHFSAMLRDEVGGRAVNLLPSETVQDIYGIVAKKVNEILQADAINGTDNEVVTVTDENPGEISEKVKLGTKALAGQWLAYGVTRSVTKRSVMTLAYGSKEFGFRQQVLRHTIQPAIDSGKGLMFTQPNQAAGYMAKLIWESVSVTVVAAVEAMNWLKSAAKLLAAEVKDKKTGEILRKRCAVHWVTPDGFPVWQEYKKPIQTRLNLMFLGQFRLQPTINTNKDSEIDAHKQESGIAPNFVHSQDGSHLRKTVVWAHEKYGIESFALIHDSFGTIPADAANLFKAVRETMVDTYESCDVLADFYDQFADQLHESQLDKMPALPAKGNLNLRDILESDFAFA

SEQ ID NO: 409 - DNA, 2670 bp, synthetic construct
  misc_feature 1..2670: note = Variant of RNA polymerase
  source 1..2670: mol_type = other DNA
atgcaccatcaccatcaccatatgaacacgattaacatcgctaagaacgacttctctgacatcgaactggctgctatcccgttcaacactctggctgaccattacggtgagcgtttagctcgcgaacagttggcccttgagcatgagtcttacgagatgggtgaagcacgtttccgcaagatgtttgagcgtcaacttaaagctggtgaggttgcggataacgctgccgccaagcctctcatcactaccctactccctaagatgattgcacgcatcaacgactggtttgaggaagtgaaagctaagcgcggcaagcgcccgacagccttccagttcctgcaagaaatcaagccggaagccgtagcgtacatcaccattaagaccactctggcttgcctaaccagtgcggaccgtacaaccgttcaggctgtagcaagcgcaatcggtcgggccattgaggacgaggctcgcttcggtcgtatccgtgaccttgaagctaagcacttcaagaaaaactacgaggaacaactcaacaagcgcgtagggcacgtcctgaagcacgcatttatgcaagttgtcgaggctgacatgctctctaagggtctactcggtggcgaggcgtggtcttcgtggcataaggaagactctattcatgtaggagtacgctgcatcgagatgctcattgagtcaaccggaatggttagcttacaccgccaaaatgctggcgtagtaggtcaagactctgagactatcgaactcgcacctgaatacgctgaggctatcgcaacccgtgcaggtgcgctggctggcatctctccgatgttccaaccttgcgtagttcctcctaagccgtggactggcattactggtggtggctattgggctaacggtcgtcgtcctctggcgctggtgcgtactcacagtaagaaaggtctgatgcgctacgaagacgtttacatgcctgaggtgtacaaagcgattaacattgcgcaaaacaccgcctggtcgatcaacaagtgggtcctggcggtcgccaacgtaatcaccaagtggaagcattgtccggtcgaggacatccctgcgattgagcgtgaagaactcccgatgaaaccggaagacatcgacatgaatcctgaggctctcaccgcgtggaaacgtgctaaagctgctgtgtaccgcaaggacaaggctcgcaagtctcgccgtatcttgcttgagttcatgcttgagcaagccaataagtttgctaaccataaggccatctggttcccttacaacatggactggcgcggtcgtgtttacgctgtgtcaatgttcaacccgcaaggtaacgatatgaccaaaggactgcttacgctggcgaaaggtaaaccaatcggtaaggaaggttactactggctgaaaatccacggtgcaaactgtgcgggtgtcgataaggttccgttccctgagcgcatcaagttcattgaggaaaaccacgagaacatcatggcttgcgctaagtctccactggagaacacttggtgggctgagcaagatagtccgttctgcttccttgcgttctgctttgagtacgctggggtacagcaccacggcctgagctataactgctcccttccgctggcgtttgacgggtcttgctctggcatccagcacttctccgcgatgctccgagatgaggtaggtggtcgcgcggttaacttgcttcctagtgaaaccgttcaggacatctacgggattgttgctaagaaagtcaacgagattctacaagcagacgcaatcaatgggaccgataacgaagtagttaccgtgaccgatgagaacgaaggtgaaatctctgagaaagtcaagctgggcactaaggcactggctggtcaatggctggcttacggtgttactcgcagtgtgactaagcgttcagtcatgacgctggcttacgggtccaaagagttcggcttccgtcaacaagtgctgcgccacactattcagccagctattgattccggcaagggtctgatgttcactcagccgaatcaggctgctggatacatggctaagctgatttgggaatctgtgagcgtgacggtggtagctgcggttgaagcaatgaactggcttaagtctgctgctaagctgctggctgctgaggtcagtgataagaaaactggagagattcttcgcaagcgttgcgctgtgcattgggtaactcctgatggtttccctgtgtggcaggaatacaagaagcctattcagacgcgcttgaacctgatgttcctcggtcagttccgcttacagcctaccattaacaccaacaaagatagcgagattgatgcacacaaacaggagtctggtatcgctcctaactttgtacacagccaagacggtagccaccttcgtaagactgtagtgtgggcacacgagaagtacggaatcgaatcttttgcactgattcacgactccttcggtaccattccggctgacgctgcgaacctgttcaaagcagtgcgcgaaactatggttgacacatatgagtcttgtgatgtactggctgatttctacgaccagttcgctgaccagttgcacgagtctcaattggacaaaatgccagcacttccggctaaaggtaacttgaacctccgtgacatcttagagtcggacttcgcgttcgcg

SEQ ID NO: 410 - protein, 890 aa, synthetic construct
  REGION 1..890: note = Variant of RNA polymerase
MHHHHHHMNTINIAKNDFSDIELAAIPFNTLADHYGERLAREQLALEHESYEMGEARFRKMFERQLKAGEVADNAAAKPLITTLLPKMIARINDWFEEVKAKRGKRPTAFQFLQEIKPEAVAYITIKTTLACLTSADRTTVQAVASAIGRAIEDEARFGRIRDLEAKHFKKNYEEQLNKRVGHVLKHAFMQVVEADMLSKGLLGGEAWSSWHKEDSIHVGVRCIEMLIESTGMVSLHRQNAGVVGQDSETIELAPEYAEAIATRAGALAGISPMFQPCVVPPKPWTGITGGGYWANGRRPLALVRTHSKKGLMRYEDVYMPEVYKAINIAQNTAWSINKWVLAVANVITKWKHCPVEDIPAIEREELPMKPEDIDMNPEALTAWKRAKAAVYRKDKARKSRRILLEFMLEQANKFANHKAIWFPYNMDWRGRVYAVSMFNPQGNDMTKGLLTLAKGKPIGKEGYYWLKIHGANCAGVDKVPFPERIKFIEENHENIMACAKSPLENTWWAEQDSPFCFLAFCFEYAGVQHHGLSYNCSLPLAFDGSCSGIQHFSAMLRDEVGGRAVNLLPSETVQDIYGIVAKKVNEILQADAINGTDNEVVTVTDENEGEISEKVKLGTKALAGQWLAYGVTRSVTKRSVMTLAYGSKEFGFRQQVLRHTIQPAIDSGKGLMFTQPNQAAGYMAKLIWESVSVTVVAAVEAMNWLKSAAKLLAAEVSDKKTGEILRKRCAVHWVTPDGFPVWQEYKKPIQTRLNLMFLGQFRLQPTINTNKDSEIDAHKQESGIAPNFVHSQDGSHLRKTVVWAHEKYGIESFALIHDSFGTIPADAANLFKAVRETMVDTYESCDVLADFYDQFADQLHESQLDKMPALPAKGNLNLRDILESDFAFA

SEQ ID NO: 411 - DNA, 2670 bp, synthetic construct
  misc_feature 1..2670: note = Variant of RNA polymerase
  source 1..2670: mol_type = other DNA
atgcaccatcaccatcaccatatgaacacgattaacatcgctaagaacgacttctctgacatcgaactggctgctatcccgttcaacactctggctgaccattacggtgagggtttagctcgcgaacagttggcccttgagcatgagtcttacgagatgggtgaagcacgtttccgcaagatgtttgagcgtcaacttaaagctggtgaggttgcggataacgctgccgccaagcctctcatcactaccctactccctaagatgattgcacgcatcaacgactggtttgaggaagtgaaagctaagcgcggcaagcgcccgacagccttccagttcctgcaagaaatcaagccggaagccgtagcgtacatcaccattaagaccactctggcttgcctaaccagtgcggaccgtacaaccgttcaggctgtagcaagcgcaatcggtcgggccattgaggacgaggctcgcttcggtcgtatccgtgaccttgaagctaagcacttcaagaaaaactacgaggaacaactcaacaagcgcgtagggcacgtcctgaagctggcatttatgcaagttgtcgaggctgacatgctctctaagggtctactcggtggcgaggcgtggtcttcgtggcataaggaagactctattcatgtaggagtacgctgcatcgagatgctcattgagtcaaccggaatggttagcttacaccgccaaaatgctggcgtagtaggtcaagactctgagactatcgaactcgcacctgaatacgctgaggctatcgcaacccgtgcaggtgcgctggctggcatctctccgatgttccaaccttgcgtagttcctcctaagccgtggactggcattactggtggtggctattgggctaacggtcgtcgtcctctggcgctggtgcgtactcacagtaagaaaggtctgatgcgctacgaagacgtttacatgcctgaggtgtacaaagcgattaacattgcgcaaaacaccgcctggtcgatcaacaagtgggtcctggcggtcgccaacgtaatcaccaagtggaagcattgtccggtcgaggacatccctgcgattgagcgtgaagaactcccgatgaaaccggaagacatcgacatgaatcctgaggctctcaccgcgtggaaacgtgctaaagctgctgtgtaccgcaaggacaaggctcgcaagtctcgccgtatcttgcttgagttcatgcttgagcaagccaataagtttgctaaccataaggccatctggttcccttacaacatggactggcgcggtcgtgtttacgctgtgtcaatgttcaacccgcaaggtaacgatatgaccaaaggactgcttacgctggcgaaaggtaaaccaatcggtaaggaaggttactactggctgaaaatccacggtgcaaactgtgcgggtgtcgataaggttccgttccctgagcgcatcaagttcattgaggaaaaccacgagaacatcatggcttgcgctaagtctccactggagaacacttggtgggctgagcaagatagtccgttctgcttccttgcgttctgctttgagtacgctggggtacagcaccacggcctgagctataactgctcccttccgctggcgtttgacgggtcttgctctggcatccagcacttctccgcgatgctccgagatgaggtaggtggtcgcgcggttaacttgcttcctagtgaaaccgttcaggacatctacgggattgttgctaagaaagtcaacgagattctacaagcagacgcaatcaatgggaccgataacgaagtagttaccgtgaccgatgagaactggggtgaaatctctgagaaagtcaagctgggcactaaggcactggctggtcaatggctggcttacggtgttactcgcagtgtgactaagcgttcagtcatgacgctggcttacgggtccaaagagttcggcttccgtcaacaagtgctgcgccacactattcagccagctattgattccggcaagggtctgatgttcactcagccgaatcaggctgctggatacatggctaagctgatttgggaatctgtgagcgtgacggtggtagctgcggttgaagcaatgaactggcttaagtctgctgctaagctgctggctgctgaggtcaatgatgccaaaactggagagattcttcgcaagcgttgcgctgtgcattgggtaactcctgatggtttccctgtgtggcaggaatacaagaagcctattcagacgcgcttgaacctgatgttcctcggtcagttccgcttacagcctaccattaacaccaacaaagatagcgagattgatgcacacaaacaggagtctggtatcgctcctaactttgtacacagccaagacggtagccaccttcgtaagactgtagtgtgggcacacgagaagtacggaatcgaatcttttgcactgattcacgactccttcggtaccattccggctgacgctgcgaacctgttcaaagcagtgcgcgaaactatggttgacacatatgagtcttgtgatgtactggctgatttctacgaccagttcgctgaccagttgcacgagtctcaattggacaaaatgccagcacttccggctaaaggtaacttgaacctccgtgacatcttagagtcggacttcgcgttcgcg

SEQ ID NO: 412 - protein, 890 aa, synthetic construct
  REGION 1..890: note = Variant of RNA polymerase
MHHHHHHMNTINIAKNDFSDIELAAIPFNTLADHYGEGLAREQLALEHESYEMGEARFRKMFERQLKAGEVADNAAAKPLITTLLPKMIARINDWFEEVKAKRGKRPTAFQFLQEIKPEAVAYITIKTTLACLTSADRTTVQAVASAIGRAIEDEARFGRIRDLEAKHFKKNYEEQLNKRVGHVLKLAFMQVVEADMLSKGLLGGEAWSSWHKEDSIHVGVRCIEMLIESTGMVSLHRQNAGVVGQDSETIELAPEYAEAIATRAGALAGISPMFQPCVVPPKPWTGITGGGYWANGRRPLALVRTHSKKGLMRYEDVYMPEVYKAINIAQNTAWSINKWVLAVANVITKWKHCPVEDIPAIEREELPMKPEDIDMNPEALTAWKRAKAAVYRKDKARKSRRILLEFMLEQANKFANHKAIWFPYNMDWRGRVYAVSMFNPQGNDMTKGLLTLAKGKPIGKEGYYWLKIHGANCAGVDKVPFPERIKFIEENHENIMACAKSPLENTWWAEQDSPFCFLAFCFEYAGVQHHGLSYNCSLPLAFDGSCSGIQHFSAMLRDEVGGRAVNLLPSETVQDIYGIVAKKVNEILQADAINGTDNEVVTVTDENWGEISEKVKLGTKALAGQWLAYGVTRSVTKRSVMTLAYGSKEFGFRQQVLRHTIQPAIDSGKGLMFTQPNQAAGYMAKLIWESVSVTVVAAVEAMNWLKSAAKLLAAEVNDAKTGEILRKRCAVHWVTPDGFPVWQEYKKPIQTRLNLMFLGQFRLQPTINTNKDSEIDAHKQESGIAPNFVHSQDGSHLRKTVVWAHEKYGIESFALIHDSFGTIPADAANLFKAVRETMVDTYESCDVLADFYDQFADQLHESQLDKMPALPAKGNLNLRDILESDFAFA

SEQ ID NO: 413 - DNA, 2670 bp, synthetic construct
  misc_feature 1..2670: note = Variant of RNA polymerase
  source 1..2670: mol_type = other DNA
atgcaccatcaccatcaccatatgaacacgattaacatcgctaagaacgacttctctgacatcgaactggctgctatcccgttcaacactctggctgaccattacggtgagggtttagctcgcgaacagttggcccttgagcatgagtcttacgagatgggtgaagcacgtttccgcaagatgtttgagcgtcaacttaaagctggtgaggttgcggataacgctgccgccaagcctctcatcactaccctactccctaagatgattgcacgcatcaacgactggtttgaggaagtgaaagctaagcgcggcaagcgcccgacagccttccagttcctgcaagaaatcaagccggaagccgtagcgtacatcaccattaagaccactctggcttgcctaaccagtgcggaccgtacaaccgttcaggctgtagcaagcgcaatcggtcgggccattgaggacgaggctcgcttcggtcgtatccgtgaccttgaagctaagcacttcctgaaaaactacgaggaacaactcaacaagcgcgtagggcacgtctacaagaaagcatttatgcaagttgtcgaggctgacatgctctctaagggtctactcggtggcgaggcgtggtcttcgtggcataaggaagactctattcatgtaggagtacgctgcatcgagatgctcattgagtcaaccggaatggttagcttacaccgccaaaatgctggcgtagtaggtgttgactctgagactatcgaactcgcacctgaatacgctgaggctatcgcaacccgtgcaggtgcgctggctggcatctctccgatgttccaaccttgcgtagttcctcctaagccgtggactggcattactggtggtggctattgggctaacggtcgtcgtcctctggcgctggtgcgtactcacagtaagaaaggtctgatgcgctacgaagacgtttacatgcctgaggtgtacaaagcgattaacattgcgcaaaacaccgcctggtcgatcaacaagtgggtcctggcggtcgccaacgtaatcaccaagtggaagcattgtccggtcgaggacatccctgcgattgagcgtgaagaactcccgatgaaaccggaagacatcgacatgaatcctgaggctctcaccgcgtggaaacgtgctaaagctgctgtgtaccgcaaggacaaggctcgcaagtctcgccgtatcttgcttgagttcatgcttgagcaagccaataagtttgctaaccataaggccatctggttcccttacaacatggactggcgcggtcgtgtttacgctgtgtcaatgttcaacccgcaaggtaacgatatgaccaaaggactgcttacgctggcgaaaggtaaaccaatcggtaaggaaggttactactggctgaaaatccacggtgcaaactgtgcgggtgtcgataaggttccgttccctgagcgcatcaagttcattgaggaaaaccacgagaacatcatggcttgcgctaagtctccactggagaacacttggtgggctgagcaagatagtccgttctgcttccttgcgttctgctttgagtacgctggggtacagcaccacggcctgagctataactgctcccttccgctggcgtttgacgggtcttgctctggcatccagcacttctccgcgatgctccgagatgaggtaggtggtcgcgcggttaacttgcttcctagtgaaaccgttcaggacatctacgggattgttgctaagaaagtcaacgagattctacaagcagacgcaatcaatgggaccgataacgaagtagttaccgtgaccgatgagaactgcggtgaaatctctgagaaagtcaagctgggcactaaggcactggctggtcaatggctggcttacggtgttactcgcagtgtgactaagcgttcagtcatgacgctggcttacgggtccaaagagttcggcttccgtcaacaagtgctgcgccacactattcagccagctattgattccggcaagggtctgatgttcactcagccgaatcaggctgctggatacatggctaagctgatttgggaatctgtgagcgtgacggtggtagctgcggttgaagcaatgaactggcttaagtctgctgctaagctgctggctgctgaggtcagtgataagaaaactggagagattcttcgcaagcgttgcgctgtgcattgggtaactcctgatggtttccctgtgtggcaggaatacaagaagcctattcagacgcgcttgaacctgatgttcctcggtcagttccgcttacagcctaccattaacaccaacaaagatagcgagattgatgcacacaaacaggagtctggtatcgctcctaactttgtacacagccaagacggtagccaccttcgtaagactgtagtgtgggcacacgagaagtacggaatcgaatcttttgcactgattcacgactccttcggtaccattccggctgacgctgcgaacctgttcaaagcagtgcgcgaaactatggttgacacatatgagtcttgtgatgtactggctgatttctacgaccagttcgctgaccagttgcacgagtctcaattggacaaaatgccagcacttccggctaaaggtaacttgaacctccgtgacatcttagagtcggacttcgcgttcgcg

SEQ ID NO: 414 - protein, 890 aa, synthetic construct
  REGION 1..890: note = Variant of RNA polymerase
MHHHHHHMNTINIAKNDFSDIELAAIPFNTLADHYGEGLAREQLALEHESYEMGEARFRKMFERQLKAGEVADNAAAKPLITTLLPKMIARINDWFEEVKAKRGKRPTAFQFLQEIKPEAVAYITIKTTLACLTSADRTTVQAVASAIGRAIEDEARFGRIRDLEAKHFLKNYEEQLNKRVGHVYKKAFMQVVEADMLSKGLLGGEAWSSWHKEDSIHVGVRCIEMLIESTGMVSLHRQNAGVVGVDSETIELAPEYAEAIATRAGALAGISPMFQPCVVPPKPWTGITGGGYWANGRRPLALVRTHSKKGLMRYEDVYMPEVYKAINIAQNTAWSINKWVLAVANVITKWKHCPVEDIPAIEREELPMKPEDIDMNPEALTAWKRAKAAVYRKDKARKSRRILLEFMLEQANKFANHKAIWFPYNMDWRGRVYAVSMFNPQGNDMTKGLLTLAKGKPIGKEGYYWLKIHGANCAGVDKVPFPERIKFIEENHENIMACAKSPLENTWWAEQDSPFCFLAFCFEYAGVQHHGLSYNCSLPLAFDGSCSGIQHFSAMLRDEVGGRAVNLLPSETVQDIYGIVAKKVNEILQADAINGTDNEVVTVTDENCGEISEKVKLGTKALAGQWLAYGVTRSVTKRSVMTLAYGSKEFGFRQQVLRHTIQPAIDSGKGLMFTQPNQAAGYMAKLIWESVSVTVVAAVEAMNWLKSAAKLLAAEVSDKKTGEILRKRCAVHWVTPDGFPVWQEYKKPIQTRLNLMFLGQFRLQPTINTNKDSEIDAHKQESGIAPNFVHSQDGSHLRKTVVWAHEKYGIESFALIHDSFGTIPADAANLFKAVRETMVDTYESCDVLADFYDQFADQLHESQLDKMPALPAKGNLNLRDILESDFAFA

SEQ ID NO: 415 - DNA, 2670 bp, synthetic construct
  misc_feature 1..2670: note = Variant of RNA polymerase
  source 1..2670: mol_type = other DNA
atgcaccatcaccatcaccatatgaacacgattaacatcgctaagaacgacttctctgacatcgaactggctgctatcccgttcaacactctggctgaccattacggtgagcgtttagctcgcgaacagttggcccttgagcatgagtcttacgagatgggtgaagcacgtttccgcaagatgtttgagcgtcaacttaaagctggtgaggttgcggataacgctgccgccaagcctctcatcactaccctactccctaagatgattgcacgcatcaacgactggtttgaggaagtgaaagctaagcgcggcaagcgcccgacagccttccagttcctgcaagaaatcaagccggaagccgtagcgtacatcaccattaagaccactctggcttgcctaaccagtgcggaccgtacaaccgttcaggctgtagcaagcgcaatcggtcgggccattgaggacgaggctcgcttcggtcgtatccgtgaccttgaagctaagcacttcaagaaaaactatgaggaacaactcaacaagcgcgtagggcacgtctacaagaaagcatttatgcaagttgtcgaggctgacatgctctctaagggtctactcggtggcgaggcgtggtcttcgtggcataaggaagactctattcatgtaggagtacgctgcatcgagatgctcattgagtcaaccggaatggttagcttacaccgccaaaatgctggcgtagtaggtcaagactctgagactatcgaactcgcacctgaatacgctgaggctatcgcaacccgtgcaggtgcgctggctggcatctctccgatgttccaaccttgcgtagttcctcctaagccgtggactggcattactggtggtggctattgggctaacggtcgtcgtcctctggcgctggtgcgtactcacagtaagaaaggtctgatgcgctacgaagacgtttacatgcctgaggtgtacaaagcgattaacattgcgcaaaacaccgcctggtcgatcaacaagtgggtcctggcggtcgccaacgtaatcaccaagtggaagcattgtccggtcgaggacatccctgcgattgagcgtgaagaactcccgatgaaaccggaagacatcgacatgaatcctgaggctctcaccgcgtggaaacgtgctaaagctgctgtgtaccgcaaggacaaggctcgcaagtctcgccgtatcttgcttgagttcatgcttgagcaagccaataagtttgctaaccataaggccatctggttcccttacaacatggactggcgcggtcgtgtttacgctgtgtcaatgttcaacccgcaaggtaacgatatgaccaaaggactgcttacgctggcgaaaggtaaaccaatcggtaaggaaggttactactggctgaaaatccacggtgcaaactgtgcgggtgtcgataaggttccgttccctgagcgcatcaagttcattgaggaaaaccacgagaacatcatggcttgcgctaagtctccactggagaacacttggtgggctgagcaagatagtccgttctgcttccttgcgttctgctttgagtacgctggggtacagcaccacggcctgagctataactgctcccttccgctggcgtttgacgggtcttgctctggcatccagcacttctccgcgatgctccgagatgaggtaggtggtcgcgcggttaacttgcttcctagtgaaaccgttcaggacatctacgggattgttgctaagaaagtcaacgagattctacaagcagacgcaatcaatgggaccgataacgaagtagttaccgtgaccgatgagaacactggtgaaatctctgagaaagtcaagctgggcactaaggcactggctggtcaatggctggcttacggtgttactcgcagtgtgactaagcgttcagtcatgacgctggcttacgggtccaaagagttcggcttccgtcaacaagtgctgcgccacactattcagccagctattgattccggcaagggtctgatgttcactcagccgaatcaggctgctggatacatggctaagctgatttgggaatctgtgagcgtgacggtggtagctgcggttgaagcaatgaactggcttaagtctgctgctaagctgctggctgctgaggtcaaagatgccaaaactggagagattcttcgcaagcgttgcgctgtgcattgggtaactcctgatggtttccctgtgtggcaggaatacaagaagcctattcagacgcgcttgaacctgatgttcctcggtcagttccgcttacagcctaccattaacaccaacaaagatagcgagattgatgcacacaaacaggagtctggtatcgctcctaactttgtacacagccaagacggtagccaccttcgtaagactgtagtgtgggcacacgagaagtacggaatcgaatcttttgcactgattcacgactccttcggtaccattccggctgacgctgcgaacctgttcaaagcagtgcgcgaaactatggttgacacatatgagtcttgtgatgtactggctgatttctacgaccagttcgctgaccagttgcacgagtctcaattggacaaaatgccagcacttccggctaaaggtaacttgaacctccgtgacatcttagagtcggacttcgcgttcgcg

SEQ ID NO: 416 - protein, 890 aa, synthetic construct
  REGION 1..890: note = Variant of RNA polymerase
MHHHHHHMNTINIAKNDFSDIELAAIPFNTLADHYGERLAREQLALEHESYEMGEARFRKMFERQLKAGEVADNAAAKPLITTLLPKMIARINDWFEEVKAKRGKRPTAFQFLQEIKPEAVAYITIKTTLACLTSADRTTVQAVASAIGRAIEDEARFGRIRDLEAKHFKKNYEEQLNKRVGHVYKKAFMQVVEADMLSKGLLGGEAWSSWHKEDSIHVGVRCIEMLIESTGMVSLHRQNAGVVGQDSETIELAPEYAEAIATRAGALAGISPMFQPCVVPPKPWTGITGGGYWANGRRPLALVRTHSKKGLMRYEDVYMPEVYKAINIAQNTAWSINKWVLAVANVITKWKHCPVEDIPAIEREELPMKPEDIDMNPEALTAWKRAKAAVYRKDKARKSRRILLEFMLEQANKFANHKAIWFPYNMDWRGRVYAVSMFNPQGNDMTKGLLTLAKGKPIGKEGYYWLKIHGANCAGVDKVPFPERIKFIEENHENIMACAKSPLENTWWAEQDSPFCFLAFCFEYAGVQHHGLSYNCSLPLAFDGSCSGIQHFSAMLRDEVGGRAVNLLPSETVQDIYGIVAKKVNEILQADAINGTDNEVVTVTDENTGEISEKVKLGTKALAGQWLAYGVTRSVTKRSVMTLAYGSKEFGFRQQVLRHTIQPAIDSGKGLMFTQPNQAAGYMAKLIWESVSVTVVAAVEAMNWLKSAAKLLAAEVKDAKTGEILRKRCAVHWVTPDGFPVWQEYKKPIQTRLNLMFLGQFRLQPTINTNKDSEIDAHKQESGIAPNFVHSQDGSHLRKTVVWAHEKYGIESFALIHDSFGTIPADAANLFKAVRETMVDTYESCDVLADFYDQFADQLHESQLDKMPALPAKGNLNLRDILESDFAFA

SEQ ID NO: 417 - DNA, 2670 bp, synthetic construct
  misc_feature 1..2670: note = Variant of RNA polymerase
  source 1..2670: mol_type = other DNA
atgcaccatcaccatcaccatatgaacacgattaacatcgctaagaacgacttctctgacatcgaactggctgctatcccgttcaacactctggctgaccattacggtgagcgtttagctcgcgaacagttggcccttgagcatgagtcttacgagatgggtgaagcacgtttccgcaagatgtttgagcgtcaacttaaagctggtgaggttgcggataacgctgccgccaagcctctcatcactaccctactccctaagatgattgcacgcatcaacgactggtttgaggaagtgaaagctaagcgcggcaagcgcccgacagccttccagttcctgcaagaaatcaagccggaagccgtagcgtacatcaccattaagaccactctggcttgcctaaccagtgcggaccgtacaaccgttcaggctgtagcaagcgcaatcggtcgggccattgaggacgaggctcgcttcggtcgtatccgtgaccttgaagctaagcacttcaagaaaaactatgaggaacaactcaacaagcgcgtagggcacgtctacaagaaagcatttatgcaagttgtcgaggctgacatgctctctaagggtctactcggtggcgaggcgtggtcttcgtggcataaggaagactctattcatgtaggagtacgctgcatcgagatgctcattgagtcaaccggaatggttagcttacaccgccaaaatgctggcgtagtaggtgttgactctgagactatcgaactcgcacctgaatacgctgaggctatcgcaacccgtgcaggtgcgctggctggcatctctccgatgttccaaccttgcgtagttcctcctaagccgtggactggcattactggtggtggctattgggctaacggtcgtcgtcctctggcgctggtgcgtactcacagtaagaaaggtctgatgcgctacgaagacgtttacatgcctgaggtgtacaaagcgattaacattgcgcaaaacaccgcctggtcgatcaacaagtgggtcctggcggtcgccaacgtaatcaccaagtggaagcattgtccggtcgaggacatccctgcgattgagcgtgaagaactcccgatgaaaccggaagacatcgacatgaatcctgaggctctcaccgcgtggaaacgtgctaaagctgctgtgtaccgcaaggacaaggctcgcaagtctcgccgtatcttgcttgagttcatgcttgagcaagccaataagtttgctaaccataaggccatctggttcccttacaacatggactggcgcggtcgtgtttacgctgtgtcaatgttcaacccgcaaggtaacgatatgaccaaaggactgcttacgctggcgaaaggtaaaccaatcggtaaggaaggttactactggctgaaaatccacggtgcaaactgtgcgggtgtcgataaggttccgttccctgagcgcatcaagttcattgaggaaaaccacgagaacatcatggcttgcgctaagtctccactggagaacacttggtgggctgagcaagatagtccgttctgcttccttgcgttctgctttgagtacgctggggtacagcaccacggcctgagctataactgctcccttccgctggcgtttgacgggtcttgctctggcatccagcacttctccgcgatgctccgagatgaggtaggtggtcgcgcggttaacttgcttcctagtgaaaccgttcaggacatctacgggattgttgctaagaaagtcaacgagattctacaagcagacgcaatcaatgggaccgataacgaagtagttaccgtgaccgatgagaacgaaggtgaaatctctgagaaagtcaagctgggcactaaggcactggctggtcaatggctggcttacggtgttactcgcagtgtgactaagcgttcagtcatgacgctggcttacgggtccaaagagttcggcttccgtcaacaagtgctgcgccacactattcagccagctattgattccggcaagggtctgatgttcactcagccgaatcaggctgctggatacatggctaagctgatttgggaatctgtgagcgtgacggtggtagctgcggttgaagcaatgaactggcttaagtctgctgctaagctgctggctgctgaggtcaaagataagaaaactggagagattcttcgcaagcgttgcgctgtgcattgggtaactcctgatggtttccctgtgtggcaggaatacaagaagcctattcagacgcgcttgaacctgatgttcctcggtcagttccgcttacagcctaccattaacaccaacaaagatagcgagattgatgcacacaaacaggagtctggtatcgctcctaactttgtacacagccaagacggtagccaccttcgtaagactgtagtgtgggcacacgagaagtacggaatcgaatcttttgcactgattcacgactccttcggtaccattccggctgacgctgcgaacctgttcaaagcagtgcgcgaaactatggttgacacatatgagtcttgtgatgtactggctgatttctacgaccagttcgctgaccagttgcacgagtctcaattggacaaaatgccagcacttccggctaaaggtaacttgaacctccgtgacatcttagagtcggacttcgcgttcgcg

SEQ ID NO: 418 - protein, 890 aa, synthetic construct
  REGION 1..890: note = Variant of RNA polymerase
MHHHHHHMNTINIAKNDFSDIELAAIPFNTLADHYGERLAREQLALEHESYEMGEARFRKMFERQLKAGEVADNAAAKPLITTLLPKMIARINDWFEEVKAKRGKRPTAFQFLQEIKPEAVAYITIKTTLACLTSADRTTVQAVASAIGRAIEDEARFGRIRDLEAKHFKKNYEEQLNKRVGHVYKKAFMQVVEADMLSKGLLGGEAWSSWHKEDSIHVGVRCIEMLIESTGMVSLHRQNAGVVGVDSETIELAPEYAEAIATRAGALAGISPMFQPCVVPPKPWTGITGGGYWANGRRPLALVRTHSKKGLMRYEDVYMPEVYKAINIAQNTAWSINKWVLAVANVITKWKHCPVEDIPAIEREELPMKPEDIDMNPEALTAWKRAKAAVYRKDKARKSRRILLEFMLEQANKFANHKAIWFPYNMDWRGRVYAVSMFNPQGNDMTKGLLTLAKGKPIGKEGYYWLKIHGANCAGVDKVPFPERIKFIEENHENIMACAKSPLENTWWAEQDSPFCFLAFCFEYAGVQHHGLSYNCSLPLAFDGSCSGIQHFSAMLRDEVGGRAVNLLPSETVQDIYGIVAKKVNEILQADAINGTDNEVVTVTDENEGEISEKVKLGTKALAGQWLAYGVTRSVTKRSVMTLAYGSKEFGFRQQVLRHTIQPAIDSGKGLMFTQPNQAAGYMAKLIWESVSVTVVAAVEAMNWLKSAAKLLAAEVKDKKTGEILRKRCAVHWVTPDGFPVWQEYKKPIQTRLNLMFLGQFRLQPTINTNKDSEIDAHKQESGIAPNFVHSQDGSHLRKTVVWAHEKYGIESFALIHDSFGTIPADAANLFKAVRETMVDTYESCDVLADFYDQFADQLHESQLDKMPALPAKGNLNLRDILESDFAFA

SEQ ID NO: 419 - DNA, 2670 bp, synthetic construct
  misc_feature 1..2670: note = Variant of RNA polymerase
  source 1..2670: mol_type = other DNA
atgcaccatcaccatcaccatatgaacacgattaacatcgctaagaacgacttctctgacatcgaactggctgctatcccgttcaacactctggctgaccattacggtgagggtttagctcgcgaacagttggcccttgagcatgagtcttacgagatgggtgaagcacgtttccgcaagatgtttgagcgtcaacttaaagctggtgaggttgcggataacgctgccgccaagcctctcatcactaccctactccctaagatgattgcacgcatcaacgactggtttgaggaagtgaaagctaagcgcggcaagcgcccgacagccttccagttcctgcaagaaatcaagccggaagccgtagcgtacatcaccattaagaccactctggcttgcctaaccagtgcggaccgtacaaccgttcaggctgtagcaagcgcaatcggtcgggccattgaggacgaggctcgcttcggtcgtatccgtgaccttgaagctaagcacttcaagaaaaactatgaggaacaactcaacaagcgcgtagggcacgtcctgaagctggcatttatgcaagttgtcgaggctgacatgctctctaagggtctactcggtggcgaggcgtggtcttcgtggcataaggaagactctattcatgtaggagtacgctgcatcgagatgctcattgagtcaaccggaatggttagcttacaccgccaaaatgctggcgtagtaggtgttgactctgagactatcgaactcgcacctgaatacgctgaggctatcgcaacccgtgcaggtgcgctggctggcatctctccgatgttccaaccttgcgtagttcctcctaagccgtggactggcattactggtggtggctattgggctaacggtcgtcgtcctctggcgctggtgcgtactcacagtaagaaaggtctgatgcgctacgaagacgtttacatgcctgaggtgtacaaagcgattaacattgcgcaaaacaccgcctggtcgatcaacaagtgggtcctggcggtcgccaacgtaatcaccaagtggaagcattgtccggtcgaggacatccctgcgattgagcgtgaagaactcccgatgaaaccggaagacatcgacatgaatcctgaggctctcaccgcgtggaaacgtgctaaagctgctgtgtaccgcaaggacaaggctcgcaagtctcgccgtatcttgcttgagttcatgcttgagcaagccaataagtttgctaaccataaggccatctggttcccttacaacatggactggcgcggtcgtgtttacgctgtgtcaatgttcaacccgcaaggtaacgatatgaccaaaggactgcttacgctggcgaaaggtaaaccaatcggtaaggaaggttactactggctgaaaatccacggtgcaaactgtgcgggtgtcgataaggttccgttccctgagcgcatcaagttcattgaggaaaaccacgagaacatcatggcttgcgctaagtctccactggagaacacttggtgggctgagcaagatagtccgttctgcttccttgcgttctgctttgagtacgctggggtacagcaccacggcctgagctataactgctcccttccgctggcgtttgacgggtcttgctctggcatccagcacttctccgcgatgctccgagatgaggtaggtggtcgcgcggttaacttgcttcctagtgaaaccgttcaggacatctacgggattgttgctaagaaagtcaacgagattctacaagcagacgcaatcaatgggaccgataacgaagtagttaccgtgaccgatgagaacacgggtgaaatctctgagaaagtcaagctgggcactaaggcactggctggtcaatggctggcttacggtgttactcgcagtgtgactaagcgttcagtcatgacgctggcttacgggtccaaagagttcggcttccgtcaacaagtgctgcgccacactattcagccagctattgattccggcaagggtctgatgttcactcagccgaatcaggctgctggatacatggctaagctgatttgggaatctgtgagcgtgacggtggtagctgcggttgaagcaatgaactggcttaagtctgctgctaagctgctggctgctgaggtcaaagatgccaaaactggagagattcttcgcaagcgttgcgctgtgcattgggtaactcctgatggtttccctgtgtggcaggaatacaagaagcctattcagacgcgcttgaacctgatgttcctcggtcagttccgcttacagcctaccattaacaccaacaaagatagcgagattgatgcacacaaacaggagtctggtatcgctcctaactttgtacacagccaagacggtagccaccttcgtaagactgtagtgtgggcacacgagaagtacggaatcgaatcttttgcactgattcacgactccttcggtaccattccggctgacgctgcgaacctgttcaaagcagtgcgcgaaactatggttgacacatatgagtcttgtgatgtactggctgatttctacgaccagttcgctgaccagttgcacgagtctcaattggacaaaatgccagcacttccggctaaaggtaacttgaacctccgtgacatcttagagtcggacttcgcgttcgcg

SEQ ID NO: 420 - protein, 890 aa, synthetic construct
  REGION 1..890: note = Variant of RNA polymerase
MHHHHHHMNTINIAKNDFSDIELAAIPFNTLADHYGEGLAREQLALEHESYEMGEARFRKMFERQLKAGEVADNAAAKPLITTLLPKMIARINDWFEEVKAKRGKRPTAFQFLQEIKPEAVAYITIKTTLACLTSADRTTVQAVASAIGRAIEDEARFGRIRDLEAKHFKKNYEEQLNKRVGHVLKLAFMQVVEADMLSKGLLGGEAWSSWHKEDSIHVGVRCIEMLIESTGMVSLHRQNAGVVGVDSETIELAPEYAEAIATRAGALAGISPMFQPCVVPPKPWTGITGGGYWANGRRPLALVRTHSKKGLMRYEDVYMPEVYKAINIAQNTAWSINKWVLAVANVITKWKHCPVEDIPAIEREELPMKPEDIDMNPEALTAWKRAKAAVYRKDKARKSRRILLEFMLEQANKFANHKAIWFPYNMDWRGRVYAVSMFNPQGNDMTKGLLTLAKGKPIGKEGYYWLKIHGANCAGVDKVPFPERIKFIEENHENIMACAKSPLENTWWAEQDSPFCFLAFCFEYAGVQHHGLSYNCSLPLAFDGSCSGIQHFSAMLRDEVGGRAVNLLPSETVQDIYGIVAKKVNEILQADAINGTDNEVVTVTDENTGEISEKVKLGTKALAGQWLAYGVTRSVTKRSVMTLAYGSKEFGFRQQVLRHTIQPAIDSGKGLMFTQPNQAAGYMAKLIWESVSVTVVAAVEAMNWLKSAAKLLAAEVKDAKTGEILRKRCAVHWVTPDGFPVWQEYKKPIQTRLNLMFLGQFRLQPTINTNKDSEIDAHKQESGIAPNFVHSQDGSHLRKTVVWAHEKYGIESFALIHDSFGTIPADAANLFKAVRETMVDTYESCDVLADFYDQFADQLHESQLDKMPALPAKGNLNLRDILESDFAFA

SEQ ID NO: 421 - DNA, 2670 bp, synthetic construct
  misc_feature 1..2670: note = Variant of RNA polymerase
  source 1..2670: mol_type = other DNA
atgcaccatcaccatcaccatatgaacacgattaacatcgctaagaacgacttctctgacatcgaactggctgctatcccgttcaacactctggctgaccattacggtgagggtttagctcgcgaacagttggcccttgagcatgagtcttacgagatgggtgaagcacgtttccgcaagatgtttgagcgtcaacttaaagctggtgaggttgcggataacgctgccgccaagcctctcatcactaccctactccctaagatgattgcacgcatcaacgactggtttgaggaagtgaaagctaagcgcggcaagcgcccgacagccttccagttcctgcaagaaatcaagccggaagccgtagcgtacatcaccattaagaccactctggcttgcctaaccagtgcggaccgtacaaccgttcaggctgtagcaagcgcaatcggtcgggccattgaggacgaggctcgcttcggtcgtatccgtgaccttgaagctaagcacttcaagaaaaactatgaggaacaactcaacaagcgcgtagggcacgtctacaagaaagcatttatgcaagttgtcgaggctgacatgctctctaagggtctactcggtggcgaggcgtggtcttcgtggcataaggaagactctattcatgtaggagtacgctgcatcgagatgctcattgagtcaaccggaatggttagcttacaccgccaaaatgctggcgtagtaggtcaagactctgagactatcgaactcgcacctgaatacgctgaggctatcgcaacccgtgcaggtgcgctggctggcatctctccgatgttccaaccttgcgtagttcctcctaagccgtggactggcattactggtggtggctattgggctaacggtcgtcgtcctctggcgctggtgcgtactcacagtaagaaaggtctgatgcgctacgaagacgtttacatgcctgaggtgtacaaagcgattaacattgcgcaaaacaccgcctggtcgatcaacaagtgggtcctggcggtcgccaacgtaatcaccaagtggaagcattgtccggtcgaggacatccctgcgattgagcgtgaagaactcccgatgaaaccggaagacatcgacatgaatcctgaggctctcaccgcgtggaaacgtgctaaagctgctgtgtaccgcaaggacaaggctcgcaagtctcgccgtatcttgcttgagttcatgcttgagcaagccaataagtttgctaaccataaggccatctggttcccttacaacatggactggcgcggtcgtgtttacgctgtgtcaatgttcaacccgcaaggtaacgatatgaccaaaggactgcttacgctggcgaaaggtaaaccaatcggtaaggaaggttactactggctgaaaatccacggtgcaaactgtgcgggtgtcgataaggttccgttccctgagcgcatcaagttcattgaggaaaaccacgagaacatcatggcttgcgctaagtctccactggagaacacttggtgggctgagcaagatagtccgttctgcttccttgcgttctgctttgagtacgctggggtacagcaccacggcctgagctataactgctcccttccgctggcgtttgacgggtcttgctctggcatccagcacttctccgcgatgctccgagatgaggtaggtggtcgcgcggttaacttgcttcctagtgaaaccgttcaggacatctacgggattgttgctaagaaagtcaacgagattctacaagcagacgcaatcaatgggaccgataacgaagtagttaccgtgaccgatgagaactgcggtgaaatctctgagaaagtcaagctgggcactaaggcactggctggtcaatggctggcttacggtgttactcgcagtgtgactaagcgttcagtcatgacgctggcttacgggtccaaagagttcggcttccgtcaacaagtgctgcgccacactattcagccagctattgattccggcaagggtctgatgttcactcagccgaatcaggctgctggatacatggctaagctgatttgggaatctgtgagcgtgacggtggtagctgcggttgaagcaatgaactggcttaagtctgctgctaagctgctggctgctgaggtcaaagataagagcactggagagattcttcgcaagcgttgcgctgtgcattgggtaactcctgatggtttccctgtgtggcaggaatacaagaagcctattcagacgcgcttgaacctgatgttcctcggtcagttccgcttacagcctaccattaacaccaacaaagatagcgagattgatgcacacaaacaggagtctggtatcgctcctaactttgtacacagccaagacggtagccaccttcgtaagactgtagtgtgggcacacgagaagtacggaatcgaatcttttgcactgattcacgactccttcggtaccattccggctgacgctgcgaacctgttcaaagcagtgcgcgaaactatggttgacacatatgagtcttgtgatgtactggctgatttctacgaccagttcgctgaccagttgcacgagtctcaattggacaaaatgccagcacttccggctaaaggtaacttgaacctccgtgacatcttagagtcggacttcgcgttcgcg

SEQ ID NO: 422 - protein, 890 aa, synthetic construct
  REGION 1..890: note = Variant of RNA polymerase
MHHHHHHMNTINIAKNDFSDIELAAIPFNTLADHYGEGLAREQLALEHESYEMGEARFRKMFERQLKAGEVADNAAAKPLITTLLPKMIARINDWFEEVKAKRGKRPTAFQFLQEIKPEAVAYITIKTTLACLTSADRTTVQAVASAIGRAIEDEARFGRIRDLEAKHFKKNYEEQLNKRVGHVYKKAFMQVVEADMLSKGLLGGEAWSSWHKEDSIHVGVRCIEMLIESTGMVSLHRQNAGVVGQDSETIELAPEYAEAIATRAGALAGISPMFQPCVVPPKPWTGITGGGYWANGRRPLALVRTHSKKGLMRYEDVYMPEVYKAINIAQNTAWSINKWVLAVANVITKWKHCPVEDIPAIEREELPMKPEDIDMNPEALTAWKRAKAAVYRKDKARKSRRILLEFMLEQANKFANHKAIWFPYNMDWRGRVYAVSMFNPQGNDMTKGLLTLAKGKPIGKEGYYWLKIHGANCAGVDKVPFPERIKFIEENHENIMACAKSPLENTWWAEQDSPFCFLAFCFEYAGVQHHGLSYNCSLPLAFDGSCSGIQHFSAMLRDEVGGRAVNLLPSETVQDIYGIVAKKVNEILQADAINGTDNEVVTVTDENCGEISEKVKLGTKALAGQWLAYGVTRSVTKRSVMTLAYGSKEFGFRQQVLRHTIQPAIDSGKGLMFTQPNQAAGYMAKLIWESVSVTVVAAVEAMNWLKSAAKLLAAEVKDKSTGEILRKRCAVHWVTPDGFPVWQEYKKPIQTRLNLMFLGQFRLQPTINTNKDSEIDAHKQESGIAPNFVHSQDGSHLRKTVVWAHEKYGIESFALIHDSFGTIPADAANLFKAVRETMVDTYESCDVLADFYDQFADQLHESQLDKMPALPAKGNLNLRDILESDFAFA

SEQ ID NO: 423 - DNA, 2670 bp, synthetic construct
  misc_feature 1..2670: note = Variant of RNA polymerase
  source 1..2670: mol_type = other DNA
atgcaccatcaccatcaccatatgaacacgattaacatcgctaagaacgacttctctgacatcgaactggctgctatcccgttcaacactctggctgaccattacggtgagggtttagctcgcgaacagttggcccttgagcatgagtcttacgagatgggtgaagcacgtttccgcaagatgtttgagcgtcaacttaaagctggtgaggttgcggataacgctgccgccaagcctctcatcactaccctactccctaagatgattgcacgcatcaacgactggtttgaggaagtgaaagctaagcgcggcaagcgcccgacagccttccagttcctgcaagaaatcaagccggaagccgtagcgtacatcaccattaagaccactctggcttgcctaaccagtgcggaccgtacaaccgttcaggctgtagcaagcgcaatcggtcgggccattgaggacgaggctcgcttcggtcgtatccgtgaccttgaagctaagcacttcaagaaaaactatgaggaacaactcaacaagcgcgtagggcacgtctacaagaaagcatttatgcaagttgtcgaggctgacatgctctctaagggtctactcggtggcgaggcgtggtcttcgtggcataaggaagactctattcatgtaggagtacgctgcatcgagatgctcattgagtcaaccggaatggttagcttacaccgccaaaatgctggcgtagtaggtcaagactctgagactatcgaactcgcacctgaatacgctgaggctatcgcaacccgtgcaggtgcgctggctggcatctctccgatgttccaaccttgcgtagttcctcctaagccgtggactggcattactggtggtggctattgggctaacggtcgtcgtcctctggcgctggtgcgtactcacagtaagaaaggtctgatgcgctacgaagacgtttacatgcctgaggtgtacaaagcgattaacattgcgcaaaacaccgcctggtcgatcaacaagtgggtcctggcggtcgccaacgtaatcaccaagtggaagcattgtccggtcgaggacatccctgcgattgagcgtgaagaactcccgatgaaaccggaagacatcgacatgaatcctgaggctctcaccgcgtggaaacgtgctaaagctgctgtgtaccgcaaggacaaggctcgcaagtctcgccgtatcttgcttgagttcatgcttgagcaagccaataagtttgctaaccataaggccatctggttcccttacaacatggactggcgcggtcgtgtttacgctgtgtcaatgttcaacccgcaaggtaacgatatgaccaaaggactgcttacgctggcgaaaggtaaaccaatcggtaaggaaggttactactggctgaaaatccacggtgcaaactgcgcgggtgtcgataaggttccgttccctgagcgcatcaagttcattgaggaaaaccacgagaacatcatggcttgcgctaagtctccactggagaacacttggtgggctgagcaagatagtccgttctgcttccttgcgttctgctttgagtacgctggggtacagcaccacggcctgagctataactgctcccttccgctggcgtttgacgggtcttgctctggcatccagcacttctccgcgatgctccgagatgaggtaggtggtcgcgcggttaacttgcttcctagtgaaaccgttcaggacatctacgggattgttgctaagaaagtcaacgagattctacaagcagacgcaatcaatgggaccgataacgaagtagttaccgtgaccgatgagaacacgggtgaaatctctgagaaagtcaagctgggcactaaggcactggctggtcaatggctggcttacggtgttactcgcagtgtgactaagcgttcagtcatgacgctggcttacgggtccaaagagttcggcttccgtcaacaagtgctgcgccacactattcagccagctattgattccggcaagggtctgatgttcactcagccgaatcaggctgctggatacatggctaagctgatttgggaatctgtgagcgtgacggtggtagctgcggttgaagcaatgaactggcttaagtctgctgctaagctgctggctgctgaggtcaaagataagagcactggagagattcttcgcaagcgttgcgctgtgcattgggtaactcctgatggtttccctgtgtggcaggaatacaagaagcctattcagacgcgcttgaacctgatgttcctcggtcagttccgcttacagcctaccattaacaccaacaaagatagcgagattgatgcacacaaacaggagtctggtatcgctcctaactttgtacacagccaagacggtagccaccttcgtaagactgtagtgtgggcacacgagaagtacggaatcgaatcttttgcactgattcacgactccttcggtaccattccggctgacgctgcgaacctgttcaaagcagtgcgcgaaactatggttgacacatatgagtcttgtgatgtactggctgatttctacgaccagttcgctgaccagttgcacgagtctcaattggacaaaatgccagcacttccggctaaaggtaacttgaacctccgtgacatcttagagtcggacttcgcgttcgcg

SEQ ID NO: 424 - protein, 890 aa, synthetic construct
  REGION 1..890: note = Variant of RNA polymerase
MHHHHHHMNTINIAKNDFSDIELAAIPFNTLADHYGEGLAREQLALEHESYEMGEARFRKMFERQLKAGEVADNAAAKPLITTLLPKMIARINDWFEEVKAKRGKRPTAFQFLQEIKPEAVAYITIKTTLACLTSADRTTVQAVASAIGRAIEDEARFGRIRDLEAKHFKKNYEEQLNKRVGHVYKKAFMQVVEADMLSKGLLGGEAWSSWHKEDSIHVGVRCIEMLIESTGMVSLHRQNAGVVGQDSETIELAPEYAEAIATRAGALAGISPMFQPCVVPPKPWTGITGGGYWANGRRPLALVRTHSKKGLMRYEDVYMPEVYKAINIAQNTAWSINKWVLAVANVITKWKHCPVEDIPAIEREELPMKPEDIDMNPEALTAWKRAKAAVYRKDKARKSRRILLEFMLEQANKFANHKAIWFPYNMDWRGRVYAVSMFNPQGNDMTKGLLTLAKGKPIGKEGYYWLKIHGANCAGVDKVPFPERIKFIEENHENIMACAKSPLENTWWAEQDSPFCFLAFCFEYAGVQHHGLSYNCSLPLAFDGSCSGIQHFSAMLRDEVGGRAVNLLPSETVQDIYGIVAKKVNEILQADAINGTDNEVVTVTDENTGEISEKVKLGTKALAGQWLAYGVTRSVTKRSVMTLAYGSKEFGFRQQVLRHTIQPAIDSGKGLMFTQPNQAAGYMAKLIWESVSVTVVAAVEAMNWLKSAAKLLAAEVKDKSTGEILRKRCAVHWVTPDGFPVWQEYKKPIQTRLNLMFLGQFRLQPTINTNKDSEIDAHKQESGIAPNFVHSQDGSHLRKTVVWAHEKYGIESFALIHDSFGTIPADAANLFKAVRETMVDTYESCDVLADFYDQFADQLHESQLDKMPALPAKGNLNLRDILESDFAFA

SEQ ID NO: 425 - DNA, 2670 bp, synthetic construct
  misc_feature 1..2670: note = Variant of RNA polymerase
  source 1..2670: mol_type = other DNA
atgcaccatcaccatcaccatatgaacacgattaacatcgctaagaacgacttctctgacatcgaactggctgctatcccgttcaacactctggctgaccattacggtgagggtttagctcgcgaacagttggcccttgagcatgagtcttacgagatgggtgaagcacgtttccgcaagatgtttgagcgtcaacttaaagctggtgaggttgcggataacgctgccgccaagcctctcatcactaccctactccctaagatgattgcacgcatcaacgactggtttgaggaagtgaaagctaagcgcggcaagcgcccgacagccttccagttcctgcaagaaatcaagccggaagccgtagcgtacatcaccattaagaccactctggcttgcctaaccagtgcggaccgtacaaccgttcaggctgtagcaagcgcaatcggtcgggccattgaggacgaggctcgcttcggtcgtatccgtgaccttgaagctaagcacttcaagaaaaactatgaggaacaactcaacaagcgcgtagggcacgtctacaagaaagcatttatgcaagttgtcgaggctgacatgctctctaagggtctactcggtggcgaggcgtggtcttcgtggcataaggaagactctattcatgtaggagtacgctgcatcgagatgctcattgagtcaaccggaatggttagcttacaccgccaaaatgctggcgtagtaggtcaagactctgagactatcgaactcgcacctgaatacgctgaggctatcgcaacccgtgcaggtgcgctggctggcatctctccgatgttccaaccttgcgtagttcctcctaagccgtggactggcattactggtggtggctattgggctaacggtcgtcgtcctctggcgctggtgcgtactcacagtaagaaaggtctgatgcgctacgaagacgtttacatgcctgaggtgtacaaagcgattaacattgcgcaaaacaccgcctggtcgatcaacaagtgggtcctggcggtcgccaacgtaatcaccaagtggaagcattgtccggtcgaggacatccctgcgattgagcgtgaagaactcccgatgaaaccggaagacatcgacatgaatcctgaggctctcaccgcgtggaaacgtgctaaagctgctgtgtaccgcaaggacaaggctcgcaagtctcgccgtatcttgcttgagttcatgcttgagcaagccaataagtttgctaaccataaggccatctggttcccttacaacatggactggcgcggtcgtgtttacgctgtgtcaatgttcaacccgcaaggtaacgatatgaccaaaggactgcttacgctggcgaaaggtaaaccaatcggtaaggaaggttactactggctgaaaatccacggtgcaaactgtgcgggtgtcgataaggttccgttccctgagcgcatcaagttcattgaggaaaaccacgagaacatcatggcttgcgctaagtctccactggagaacacttggtgggctgagcaagatagtccgttctgcttccttgcgttctgctttgagtacgctggggtacagcaccacggcctgagctataactgctcccttccgctggcgtttgacgggtcttgctctggcatccagcacttctccgcgatgctccgagatgaggtaggtggtcgcgcggttaacttgcttcctagtgaaaccgttcaggacatctacgggattgttgctaagaaagtcaacgagattctacaagcagacgcaatcaatgggaccgataacgaagtagttaccgtgaccgatgagaacactggtgaaatctctgagaaagtcaagctgggcactaaggcactggctggtcaatggctggcttacggtgttactcgcagtgtgactaagcgttcagtcatgacgctggcttacgggtccaaagagttcggcttccgtcaacaagtgctgcgccacactattcagccagctattgattccggcaagggtctgatgttcactcagccgaatcaggctgctggatacatggctaagctgatttgggaatctgtgagcgtgacggtggtagctgcggttgaagcaatgaactggcttaagtctgctgctaagctgctggctgctgaggtcaaagatgccagcactggagagattcttcgcaagcgttgcgctgtgcattgggtaactcctgatggtttccctgtgtggcaggaatacaagaagcctattcagacgcgcttgaacctgatgttcctcggtcagttccgcttacagcctaccattaacaccaacaaagatagcgagattgatgcacacaaacaggagtctggtatcgctcctaactttgtacacagccaagacggtagccaccttcgtaagactgtagtgtgggcacacgagaagtacggaatcgaatcttttgcactgattcacgactccttcggtaccattccggctgacgctgcgaacctgttcaaagcagtgcgcgaaactatggttgacacatatgagtcttgtgatgtactggctgatttctacgaccagttcgctgaccagttgcacgagtctcaattggacaaaatgccagcacttccggctaaaggtaacttgaacctccgtgacatcttagagtcggacttcgcgttcgcg

SEQ ID NO: 426 - protein, 890 aa, synthetic construct
  REGION 1..890: note = Variant of RNA polymerase
MHHHHHHMNTINIAKNDFSDIELAAIPFNTLADHYGEGLAREQLALEHESYEMGEARFRKMFERQLKAGEVADNAAAKPLITTLLPKMIARINDWFEEVKAKRGKRPTAFQFLQEIKPEAVAYITIKTTLACLTSADRTTVQAVASAIGRAIEDEARFGRIRDLEAKHFKKNYEEQLNKRVGHVYKKAFMQVVEADMLSKGLLGGEAWSSWHKEDSIHVGVRCIEMLIESTGMVSLHRQNAGVVGQDSETIELAPEYAEAIATRAGALAGISPMFQPCVVPPKPWTGITGGGYWANGRRPLALVRTHSKKGLMRYEDVYMPEVYKAINIAQNTAWSINKWVLAVANVITKWKHCPVEDIPAIEREELPMKPEDIDMNPEALTAWKRAKAAVYRKDKARKSRRILLEFMLEQANKFANHKAIWFPYNMDWRGRVYAVSMFNPQGNDMTKGLLTLAKGKPIGKEGYYWLKIHGANCAGVDKVPFPERIKFIEENHENIMACAKSPLENTWWAEQDSPFCFLAFCFEYAGVQHHGLSYNCSLPLAFDGSCSGIQHFSAMLRDEVGGRAVNLLPSETVQDIYGIVAKKVNEILQADAINGTDNEVVTVTDENTGEISEKVKLGTKALAGQWLAYGVTRSVTKRSVMTLAYGSKEFGFRQQVLRHTIQPAIDSGKGLMFTQPNQAAGYMAKLIWESVSVTVVAAVEAMNWLKSAAKLLAAEVKDASTGEILRKRCAVHWVTPDGFPVWQEYKKPIQTRLNLMFLGQFRLQPTINTNKDSEIDAHKQESGIAPNFVHSQDGSHLRKTVVWAHEKYGIESFALIHDSFGTIPADAANLFKAVRETMVDTYESCDVLADFYDQFADQLHESQLDKMPALPAKGNLNLRDILESDFAFA

SEQ ID NO: 427 - DNA, 2670 bp, synthetic construct
  misc_feature 1..2670: note = Variant of RNA polymerase
  source 1..2670: mol_type = other DNA
atgcaccatcaccatcaccatatgaacacgattaacatcgctaagaacgacttctctgacatcgaactggctgctatcccgttcaacactctggctgaccattacggtgagggtttagctcgcgaacagttggcccttgagcatgagtcttacgagatgggtgaagcacgtttccgcaagatgtttgagcgtcaacttaaagctggtgaggttgcggataacgctgccgccaagcctctcatcactaccctactccctaagatgattgcacgcatcaacgactggtttgaggaagtgaaagctaagcgcggcaagcgcccgacagccttccagttcctgcaagaaatcaagccggaagccgtagcgtacatcaccattaagaccactctggcttgcctaaccagtgcggaccgtacaaccgttcaggctgtagcaagcgcaatcggtcgggccattgaggacgaggctcgcttcggtcgtatccgtgaccttgaagctaagcacttcctgaaaaactacgaggaacaactcaacaagcgcgtagggcacgtctacaagaaagcatttatgcaagttgtcgaggctgacatgctctctaagggtctactcggtggcgaggcgtggtcttcgtggcataaggaagactctattcatgtaggagtacgctgcatcgagatgctcattgagtcaaccggaatggttagcttacaccgccaaaatgctggcgtagtaggtcaagactctgagactatcgaactcgcacctgaatacgctgaggctatcgcaacccgtgcaggtgcgctggctggcatctctccgatgttccaaccttgcgtagttcctcctaagccgtggactggcattactggtggtggctattgggctaacggtcgtcgtcctctggcgctggtgcgtactcacagtaagaaaggtctgatgcgctacgaagacgtttacatgcctgaggtgtacaaagcgattaacattgcgcaaaacaccgcctggtcgatcaacaagtgggtcctggcggtcgccaacgtaatcaccaagtggaagcattgtccggtcgaggacatccctgcgattgagcgtgaagaactcccgatgaaaccggaagacatcgacatgaatcctgaggctctcaccgcgtggaaacgtgctaaagctgctgtgtaccgcaaggacaaggctcgcaagtctcgccgtatcttgcttgagttcatgcttgagcaagccaataagtttgctaaccataaggccatctggttcccttacaacatggactggcgcggtcgtgtttacgctgtgtcaatgttcaacccgcaaggtaacgatatgaccaaaggactgcttacgctggcgaaaggtaaaccaatcggtaaggaaggttactactggctgaaaatccacggtgcaaactgtgcgggtgtcgataaggttccgttccctgagcgcatcaagttcattgaggaaaaccacgagaacatcatggcttgcgctaagtctccactggagaacacttggtgggctgagcaagatagtccgttctgcttccttgcgttctgctttgagtacgctggggtacagcaccacggcctgagctataactgctcccttccgctggcgtttgacgggtcttgctctggcatccagcacttctccgcgatgctccgagatgaggtaggtggtcgcgcggttaacttgcttcctagtgaaaccgttcaggacatctacgggattgttgctaagaaagtcaacgagattctacaagcagacgcaatcaatgggaccgataacgaagtagttaccgtgaccgatgagaactgcggtgaaatctctgagaaagtcaagctgggcactaaggcactggctggtcaatggctggcttacggtgttactcgcagtgtgactaagcgttcagtcatgacgctggcttacgggtccaaagagttcggcttccgtcaacaagtgctgcgccacactattcagccagctattgattccggcaagggtctgatgttcactcagccgaatcaggctgctggatacatggctaagctgatttgggaatctgtgagcgtgacggtggtagctgcggttgaagcaatgaactggcttaagtctgctgctaagctgctggctgctgaggtcagtgatgccaaaactggagagattcttcgcaagcgttgcgctgtgcattgggtaactcctgatggtttccctgtgtggcaggaatacaagaagcctattcagacgcgcttgaacctgatgttcctcggtcagttccgcttacagcctaccattaacaccaacaaagatagcgagattgatgcacacaaacaggagtctggtatcgctcctaactttgtacacagccaagacggtagccaccttcgtaagactgtagtgtgggcacacgagaagtacggaatcgaatcttttgcactgattcacgactccttcggtaccattccggctgacgctgcgaacctgttcaaagcagtgcgcgaaactatggttgacacatatgagtcttgtgatgtactggctgatttctacgaccagttcgctgaccagttgcacgagtctcaattggacaaaatgccagcacttccggctaaaggtaacttgaacctccgtgacatcttagagtcggacttcgcgttcgcg

SEQ ID NO: 428 - protein, 890 aa, synthetic construct
  REGION 1..890: note = Variant of RNA polymerase
MHHHHHHMNTINIAKNDFSDIELAAIPFNTLADHYGEGLAREQLALEHESYEMGEARFRKMFERQLKAGEVADNAAAKPLITTLLPKMIARINDWFEEVKAKRGKRPTAFQFLQEIKPEAVAYITIKTTLACLTSADRTTVQAVASAIGRAIEDEARFGRIRDLEAKHFLKNYEEQLNKRVGHVYKKAFMQVVEADMLSKGLLGGEAWSSWHKEDSIHVGVRCIEMLIESTGMVSLHRQNAGVVGQDSETIELAPEYAEAIATRAGALAGISPMFQPCVVPPKPWTGITGGGYWANGRRPLALVRTHSKKGLMRYEDVYMPEVYKAINIAQNTAWSINKWVLAVANVITKWKHCPVEDIPAIEREELPMKPEDIDMNPEALTAWKRAKAAVYRKDKARKSRRILLEFMLEQANKFANHKAIWFPYNMDWRGRVYAVSMFNPQGNDMTKGLLTLAKGKPIGKEGYYWLKIHGANCAGVDKVPFPERIKFIEENHENIMACAKSPLENTWWAEQDSPFCFLAFCFEYAGVQHHGLSYNCSLPLAFDGSCSGIQHFSAMLRDEVGGRAVNLLPSETVQDIYGIVAKKVNEILQADAINGTDNEVVTVTDENCGEISEKVKLGTKALAGQWLAYGVTRSVTKRSVMTLAYGSKEFGFRQQVLRHTIQPAIDSGKGLMFTQPNQAAGYMAKLIWESVSVTVVAAVEAMNWLKSAAKLLAAEVSDAKTGEILRKRCAVHWVTPDGFPVWQEYKKPIQTRLNLMFLGQFRLQPTINTNKDSEIDAHKQESGIAPNFVHSQDGSHLRKTVVWAHEKYGIESFALIHDSFGTIPADAANLFKAVRETMVDTYESCDVLADFYDQFADQLHESQLDKMPALPAKGNLNLRDILESDFAFA

SEQ ID NO: 429 - DNA, 2670 bp, synthetic construct
  misc_feature 1..2670: note = Variant of RNA polymerase
  source 1..2670: mol_type = other DNA
atgcaccatcaccatcaccatatgaacacgattaacatcgctaagaacgacttctctgacatcgaactggctgctatcccgttcaacactctggctgaccattacggtgagggtttagctcgcgaacagttggcccttgagcatgagtcttacgagatgggtgaagcacgtttccgcaagatgtttgagcgtcaacttaaagctggtgaggttgcggataacgctgccgccaagcctctcatcactaccctactccctaagatgattgcacgcatcaacgactggtttgaggaagtgaaagctaagcgcggcaagcgcccgacagccttccagttcctgcaagaaatcaagccggaagccgtagcgtacatcaccattaagaccactctggcttgcctaaccagtgcggaccgtacaaccgttcaggctgtagcaagcgcaatcggtcgggccattgaggacgaggctcgcttcggtcgtatccgtgaccttgaagctaagcacttcaagaaaaactacgaggaacaactcaacaagcgcgtagggcacgtctacaagaaagcatttatgcaagttgtcgaggctgacatgctctctaagggtctactcggtggcgaggcgtggtcttcgtggcataaggaagactctattcatgtaggagtacgctgcatcgagatgctcattgagtcaaccggaatggttagcttacaccgccaaaatgctggcgtagtaggtcaagactctgagactatcgaactcgcacctgaatacgctgaggctatcgcaacccgtgcaggtgcgctggctggcatctctccgatgttccaaccttgcgtagttcctcctaagccgtggactggcattactggtggtggctattgggctaacggtcgtcgtcctctggcgctggtgcgtactcacagtaagaaaggtctgatgcgctacgaagacgtttacatgcctgaggtgtacaaagcgattaacattgcgcaaaacaccgcctggtcgatcaacaagtgggtcctggcggtcgccaacgtaatcaccaagtggaagcattgtccggtcgaggacatccctgcgattgagcgtgaagaactcccgatgaaaccggaagacatcgacatgaatcctgaggctctcaccgcgtggaaacgtgctaaagctgctgtgtaccgcaaggacaaggctcgcaagtctcgccgtatcttgcttgagttcatgcttgagcaagccaataagtttgctaaccataaggccatctggttcccttacaacatggactggcgcggtcgtgtttacgctgtgtcaatgttcaacccgcaaggtaacgatatgaccaaaggactgcttacgctggcgaaaggtaaaccaatcggtaaggaaggttactactggctgaaaatccacggtgcaaactgtgcgggtgtcgataaggttccgttccctgagcgcatcaagttcattgaggaaaaccacgagaacatcatggcttgcgctaagtctccactggagaacacttggtgggctgagcaagatagtccgttctgcttccttgcgttctgctttgagtacgctggggtacagcaccacggcctgagctataactgctcccttccgctggcgtttgacgggtcttgctctggcatccagcacttctccgcgatgctccgagatgaggtaggtggtcgcgcggttaacttgcttcctagtgaaaccgttcaggacatctacgggattgttgctaagaaagtcaacgagattctacaagcagacgcaatcaatgggaccgataacgaagtagttaccgtgaccgatgagaacacgggtgaaatctctgagaaagtcaagctgggcactaaggcactggctggtcaatggctggcttacggtgttactcgcagtgtgactaagcgttcagtcatgacgctggcttacgggtccaaagagttcggcttccgtcaacaagtgctgcgccacactattcagccagctattgattccggcaagggtctgatgttcactcagccgaatcaggctgctggatacatggctaagctgatttgggaatctgtgagcgtgacggtggtagctgcggttgaagcaatgaactggcttaagtctgctgctaagctgctggctgctgaggtcagtgataagaaaactggagagattcttcgcaagcgttgcgctgtgcattgggtaactcctgatggtttccctgtgtggcaggaatacaagaagcctattcagacgcgcttgaacctgatgttcctcggtcagttccgcttacagcctaccattaacaccaacaaagatagcgagattgatgcacacaaacaggagtctggtatcgctcctaactttgtacacagccaagacggtagccaccttcgtaagactgtagtgtgggcacacgagaagtacggaatcgaatcttttgcactgattcacgactccttcggtaccattccggctgacgctgcgaacctgttcaaagcagtgcgcgaaactatggttgacacatatgagtcttgtgatgtactggctgatttctacgaccagttcgctgaccagttgcacgagtctcaattggacaaaatgccagcacttccggctaaaggtaacttgaacctccgtgacatcttagagtcggacttcgcgttcgcg

SEQ ID NO: 430 - protein, 890 aa, synthetic construct
  REGION 1..890: note = Variant of RNA polymerase
MHHHHHHMNTINIAKNDFSDIELAAIPFNTLADHYGEGLAREQLALEHESYEMGEARFRKMFERQLKAGEVADNAAAKPLITTLLPKMIARINDWFEEVKAKRGKRPTAFQFLQEIKPEAVAYITIKTTLACLTSADRTTVQAVASAIGRAIEDEARFGRIRDLEAKHFKKNYEEQLNKRVGHVYKKAFMQVVEADMLSKGLLGGEAWSSWHKEDSIHVGVRCIEMLIESTGMVSLHRQNAGVVGQDSETIELAPEYAEAIATRAGALAGISPMFQPCVVPPKPWTGITGGGYWANGRRPLALVRTHSKKGLMRYEDVYMPEVYKAINIAQNTAWSINKWVLAVANVITKWKHCPVEDIPAIEREELPMKPEDIDMNPEALTAWKRAKAAVYRKDKARKSRRILLEFMLEQANKFANHKAIWFPYNMDWRGRVYAVSMFNPQGNDMTKGLLTLAKGKPIGKEGYYWLKIHGANCAGVDKVPFPERIKFIEENHENIMACAKSPLENTWWAEQDSPFCFLAFCFEYAGVQHHGLSYNCSLPLAFDGSCSGIQHFSAMLRDEVGGRAVNLLPSETVQDIYGIVAKKVNEILQADAINGTDNEVVTVTDENTGEISEKVKLGTKALAGQWLAYGVTRSVTKRSVMTLAYGSKEFGFRQQVLRHTIQPAIDSGKGLMFTQPNQAAGYMAKLIWESVSVTVVAAVEAMNWLKSAAKLLAAEVSDKKTGEILRKRCAVHWVTPDGFPVWQEYKKPIQTRLNLMFLGQFRLQPTINTNKDSEIDAHKQESGIAPNFVHSQDGSHLRKTVVWAHEKYGIESFALIHDSFGTIPADAANLFKAVRETMVDTYESCDVLADFYDQFADQLHESQLDKMPALPAKGNLNLRDILESDFAFA

SEQ ID NO: 431 - DNA, 2670 bp, synthetic construct
  misc_feature 1..2670: note = Variant of RNA polymerase
  source 1..2670: mol_type = other DNA
atgcaccatcaccatcaccatatgaacacgattaacatcgctaagaacgacttctctgacatcgaactggctgctatcccgttcaacactctggctgaccattacggtgagggtttagctcgcgaacagttggcccttgagcatgagtcttacgagatgggtgaagcacgtttccgcaagatgtttgagcgtcaacttaaagctggtgaggttgcggataacgctgccgccaagcctctcatcactaccctactccctaagatgattgcacgcatcaacgactggtttgaggaagtgaaagctaagcgcggcaagcgcccgacagccttccagttcctgcaagaaatcaagccggaagccgtagcgtacatcaccattaagaccactctggcttgcctaaccagtgcggaccgtacaaccgttcaggctgtagcaagcgcaatcggtcgggccattgaggacgaggctcgcttcggtcgtatccgtgaccttgaagctaagcacttcctgaaaaactacgaggaacaactcaacaagcgcgtagggcacgtctacaagaaagcatttatgcaagttgtcgaggctgacatgctctctaagggtctactcggtggcgaggcgtggtcttcgtggcataaggaagactctattcatgtaggagtacgctgcatcgagatgctcattgagtcaaccggaatggttagcttacaccgccaaaatgctggcgtagtaggtgttgactctgagactatcgaactcgcacctgaatacgctgaggctatcgcaacccgtgcaggtgcgctggctggcatctctccgatgttccaaccttgcgtagttcctcctaagccgtggactggcattactggtggtggctattgggctaacggtcgtcgtcctctggcgctggtgcgtactcacagtaagaaaggtctgatgcgctacgaagacgtttacatgcctgaggtgtacaaagcgattaacattgcgcaaaacaccgcctggtcgatcaacaagtgggtcctggcggtcgccaacgtaatcaccaagtggaagcattgtccggtcgaggacatccctgcgattgagcgtgaagaactcccgatgaaaccggaagacatcgacatgaatcctgaggctctcaccgcgtggaaacgtgctaaagctgctgtgtaccgcaaggacaaggctcgcaagtctcgccgtatcttgcttgagttcatgcttgagcaagccaataagtttgctaaccataaggccatctggttcccttacaacatggactggcgcggtcgtgtttacgctgtgtcaatgttcaacccgcaaggtaacgatatgaccaaaggactgcttacgctggcgaaaggtaaaccaatcggtaaggaaggttactactggctgaaaatccacggtgcaaactgtgcgggtgtcgataaggttccgttccctgagcgcatcaagttcattgaggaaaaccacgagaacatcatggcttgcgctaagtctccactggagaacacttggtgggctgagcaagatagtccgttctgcttccttgcgttctgctttgagtacgctggggtacagcaccacggcctgagctataactgctcccttccgctggcgtttgacgggtcttgctctggcatccagcacttctccgcgatgctccgagatgaggtaggtggtcgcgcggttaacttgcttcctagtgaaaccgttcaggacatctacgggattgttgctaagaaagtcaacgagattctacaagcagacgcaatcaatgggaccgataacgaagtagttaccgtgaccgatgagaacccgggtgaaatctctgagaaagtcaagctgggcactaaggcactggctggtcaatggctggcttacggtgttactcgcagtgtgactaagcgttcagtcatgacgctggcttacgggtccaaagagttcggcttccgtcaacaagtgctgcgccacactattcagccagctattgattccggcaagggtctgatgttcactcagccgaatcaggctgctggatacatggctaagctgatttgggaatctgtgagcgtgacggtggtagctgcggttgaagcaatgaactggcttaagtctgctgctaagctgctggctgctgaggtcagtgataagaaaactggagagattcttcgcaagcgttgcgctgtgcattgggtaactcctgatggtttccctgtgtggcaggaatacaagaagcctattcagacgcgcttgaacctgatgttcctcggtcagttccgcttacagcctaccattaacaccaacaaagatagcgagattgatgcacacaaacaggagtctggtatcgctcctaactttgtacacagccaagacggtagccaccttcgtaagactgtagtgtgggcacacgagaagtacggaatcgaatcttttgcactgattcacgactccttcggtaccattccggctgacgctgcgaacctgttcaaagcagtgcgcgaaactatggttgacacatatgagtcttgtgatgtactggctgatttctacgaccagttcgctgaccagttgcacgagtctcaattggacaaaatgccagcacttccggctaaaggtaacttgaacctccgtgacatcttagagtcggacttcgcgttcgcg

SEQ ID NO: 432 - protein, 890 aa, synthetic construct
  REGION 1..890: note = Variant of RNA polymerase
MHHHHHHMNTINIAKNDFSDIELAAIPFNTLADHYGEGLAREQLALEHESYEMGEARFRKMFERQLKAGEVADNAAAKPLITTLLPKMIARINDWFEEVKAKRGKRPTAFQFLQEIKPEAVAYITIKTTLACLTSADRTTVQAVASAIGRAIEDEARFGRIRDLEAKHFLKNYEEQLNKRVGHVYKKAFMQVVEADMLSKGLLGGEAWSSWHKEDSIHVGVRCIEMLIESTGMVSLHRQNAGVVGVDSETIELAPEYAEAIATRAGALAGISPMFQPCVVPPKPWTGITGGGYWANGRRPLALVRTHSKKGLMRYEDVYMPEVYKAINIAQNTAWSINKWVLAVANVITKWKHCPVEDIPAIEREELPMKPEDIDMNPEALTAWKRAKAAVYRKDKARKSRRILLEFMLEQANKFANHKAIWFPYNMDWRGRVYAVSMFNPQGNDMTKGLLTLAKGKPIGKEGYYWLKIHGANCAGVDKVPFPERIKFIEENHENIMACAKSPLENTWWAEQDSPFCFLAFCFEYAGVQHHGLSYNCSLPLAFDGSCSGIQHFSAMLRDEVGGRAVNLLPSETVQDIYGIVAKKVNEILQADAINGTDNEVVTVTDENPGEISEKVKLGTKALAGQWLAYGVTRSVTKRSVMTLAYGSKEFGFRQQVLRHTIQPAIDSGKGLMFTQPNQAAGYMAKLIWESVSVTVVAAVEAMNWLKSAAKLLAAEVSDKKTGEILRKRCAVHWVTPDGFPVWQEYKKPIQTRLNLMFLGQFRLQPTINTNKDSEIDAHKQESGIAPNFVHSQDGSHLRKTVVWAHEKYGIESFALIHDSFGTIPADAANLFKAVRETMVDTYESCDVLADFYDQFADQLHESQLDKMPALPAKGNLNLRDILESDFAFA

SEQ ID NO: 433 - DNA, 2670 bp, synthetic construct
  misc_feature 1..2670: note = Variant of RNA polymerase
  source 1..2670: mol_type = other DNA
atgcaccatcaccatcaccatatgaacacgattaacatcgctaagaacgacttctctgacatcgaactggctgctatcccgttcaacactctggctgaccattacggtgagggtttagctcgcgaacagttggcccttgagcatgagtcttacgagatgggtgaagcacgtttccgcaagatgtttgagcgtcaacttaaagctggtgaggttgcggataacgctgccgccaagcctctcatcactaccctactccctaagatgattgcacgcatcaacgactggtttgaggaagtgaaagctaagcgcggcaagcgcccgacagccttccagttcctgcaagaaatcaagccggaagccgtagcgtacatcaccattaagaccactctggcttgcctaaccagtgcggaccgtacaaccgttcaggctgtagcaagcgcaatcggtcgggccattgaggacgaggctcgcttcggtcgtatccgtgaccttgaagctaagcacttcaagaaaaactacgaggaacaactcaacaagcgcgtagggcacgtcctgaagctggcatttatgcaagttgtcgaggctgacatgctctctaagggtctactcggtggcgaggcgtggtcttcgtggcataaggaagactctattcatgtaggagtacgctgcatcgagatgctcattgagtcaaccggaatggttagcttacaccgccaaaatgctggcgtagtaggtcaagactctgagactatcgaactcgcacctgaatacgctgaggctatcgcaacccgtgcaggtgcgctggctggcatctctccgatgttccaaccttgcgtagttcctcctaagccgtggactggcattactggtggtggctattgggctaacggtcgtcgtcctctggcgctggtgcgtactcacagtaagaaaggtctgatgcgctacgaagacgtttacatgcctgaggtgtacaaagcgattaacattgcgcaaaacaccgcctggtcgatcaacaagtgggtcctggcggtcgccaacgtaatcaccaagtggaagcattgtccggtcgaggacatccctgcgattgagcgtgaagaactcccgatgaaaccggaagacatcgacatgaatcctgaggctctcaccgcgtggaaacgtgctaaagctgctgtgtaccgcaaggacaaggctcgcaagtctcgccgtatcttgcttgagttcatgcttgagcaagccaataagtttgctaaccataaggccatctggttcccttacaacatggactggcgcggtcgtgtttacgctgtgtcaatgttcaacccgcaaggtaacgatatgaccaaaggactgcttacgctggcgaaaggtaaaccaatcggtaaggaaggttactactggctgaaaatccacggtgcaaactgtgcgggtgtcgataaggttccgttccctgagcgcatcaagttcattgaggaaaaccacgagaacatcatggcttgcgctaagtctccactggagaacacttggtgggctgagcaagatagtccgttctgcttccttgcgttctgctttgagtacgctggggtacagcaccacggcctgagctataactgctcccttccgctggcgtttgacgggtcttgctctggcatccagcacttctccgcgatgctccgagatgaggtaggtggtcgcgcggttaacttgcttcctagtgaaaccgttcaggacatctacgggattgttgctaagaaagtcaacgagattctacaagcagacgcaatcaatgggaccgataacgaagtagttaccgtgaccgatgagaacccgggtgaaatctctgagaaagtcaagctgggcactaaggcactggctggtcaatggctggcttacggtgttactcgcagtgtgactaagcgttcagtcatgacgctggcttacgggtccaaagagttcggcttccgtcaacaagtgctgcgccacactattcagccagctattgattccggcaagggtctgatgttcactcagccgaatcaggctgctggatacatggctaagctgatttgggaatctgtgagcgtgacggtggtagctgcggttgaagcaatgaactggcttaagtctgctgctaagctgctggctgctgaggtcagtgataagagcactggagagattcttcgcaagcgttgcgctgtgcattgggtaactcctgatggtttccctgtgtggcaggaatacaagaagcctattcagacgcgcttgaacctgatgttcctcggtcagttccgcttacagcctaccattaacaccaacaaagatagcgagattgatgcacacaaacaggagtctggtatcgctcctaactttgtacacagccaagacggtagccaccttcgtaagactgtagtgtgggcacacgagaagtacggaatcgaatcttttgcactgattcacgactccttcggtaccattccggctgacgctgcgaacctgttcaaagcagtgcgcgaaactatggttgacacatatgagtcttgtgatgtactggctgatttctacgaccagttcgctgaccagttgcacgagtctcaattggacaaaatgccagcacttccggctaaaggtaacttgaacctccgtgacatcttagagtcggacttcgcgttcgcg

SEQ ID NO: 434 - protein, 890 aa, synthetic construct
  REGION 1..890: note = Variant of RNA polymerase
MHHHHHHMNTINIAKNDFSDIELAAIPFNTLADHYGEGLAREQLALEHESYEMGEARFRKMFERQLKAGEVADNAAAKPLITTLLPKMIARINDWFEEVKAKRGKRPTAFQFLQEIKPEAVAYITIKTTLACLTSADRTTVQAVASAIGRAIEDEARFGRIRDLEAKHFKKNYEEQLNKRVGHVLKLAFMQVVEADMLSKGLLGGEAWSSWHKEDSIHVGVRCIEMLIESTGMVSLHRQNAGVVGQDSETIELAPEYAEAIATRAGALAGISPMFQPCVVPPKPWTGITGGGYWANGRRPLALVRTHSKKGLMRYEDVYMPEVYKAINIAQNTAWSINKWVLAVANVITKWKHCPVEDIPAIEREELPMKPEDIDMNPEALTAWKRAKAAVYRKDKARKSRRILLEFMLEQANKFANHKAIWFPYNMDWRGRVYAVSMFNPQGNDMTKGLLTLAKGKPIGKEGYYWLKIHGANCAGVDKVPFPERIKFIEENHENIMACAKSPLENTWWAEQDSPFCFLAFCFEYAGVQHHGLSYNCSLPLAFDGSCSGIQHFSAMLRDEVGGRAVNLLPSETVQDIYGIVAKKVNEILQADAINGTDNEVVTVTDENPGEISEKVKLGTKALAGQWLAYGVTRSVTKRSVMTLAYGSKEFGFRQQVLRHTIQPAIDSGKGLMFTQPNQAAGYMAKLIWESVSVTVVAAVEAMNWLKSAAKLLAAEVSDKSTGEILRKRCAVHWVTPDGFPVWQEYKKPIQTRLNLMFLGQFRLQPTINTNKDSEIDAHKQESGIAPNFVHSQDGSHLRKTVVWAHEKYGIESFALIHDSFGTIPADAANLFKAVRETMVDTYESCDVLADFYDQFADQLHESQLDKMPALPAKGNLNLRDILESDFAFA

SEQ ID NO: 435 - DNA, 2670 bp, synthetic construct
  misc_feature 1..2670: note = Variant of RNA polymerase
  source 1..2670: mol_type = other DNA
atgcaccatcaccatcaccatatgaacacgattaacatcgctaagaacgacttctctgacatcgaactggctgctatcccgttcaacactctggctgaccattacggtgagcgtttagctcgcgaacagttggcccttgagcatgagtcttacgagatgggtgaagcacgtttccgcaagatgtttgagcgtcaacttaaagctggtgaggttgcggataacgctgccgccaagcctctcatcactaccctactccctaagatgattgcacgcatcaacgactggtttgaggaagtgaaagctaagcgcggcaagcgcccgacagccttccagttcctgcaagaaatcaagccggaagccgtagcgtacatcaccattaagaccactctggcttgcctaaccagtgcggaccgtacaaccgttcaggctgtagcaagcgcaatcggtcgggccattgaggacgaggctcgcttcggtcgtatccgtgaccttgaagctaagcacttcaagaaaaactacgaggaacaactcaacaagcgcgtagggcacgtctacaagaaagcatttatgcaagttgtcgaggctgacatgctctctaagggtctactcggtggcgaggcgtggtcttcgtggcataaggaagactctattcatgtaggagtacgctgcatcgagatgctcattgagtcaaccggaatggttagcttacaccgccaaaatgctggcgtagtaggtcaagactctgagactatcgaactcgcacctgaatacgctgaggctatcgcaacccgtgcaggtgcgctggctggcatctctccgatgttccaaccttgcgtagttcctcctaagccgtggactggcattactggtggtggctattgggctaacggtcgtcgtcctctggcgctggtgcgtactcacagtaagaaaggtctgatgcgctacgaagacgtttacatgcctgaggtgtacaaagcgattaacattgcgcaaaacaccgcctggtcgatcaacaagtgggtcctggcggtcgccaacgtaatcaccaagtggaagcattgtccggtcgaggacatccctgcgattgagcgtgaagaactcccgatgaaaccggaagacatcgacatgaatcctgaggctctcaccgcgtggaaacgtgctaaagctgctgtgtaccgcaaggacaaggctcgcaagtctcgccgtatcttgcttgagttcatgcttgagcaagccaataagtttgctaaccataaggccatctggttcccttacaacatggactggcgcggtcgtgtttacgctgtgtcaatgttcaacccgcaaggtaacgatatgaccaaaggactgcttacgctggcgaaaggtaaaccaatcggtaaggaaggttactactggctgaaaatccacggtgcaaactgtgcgggtgtcgataaggttccgttccctgagcgcatcaagttcattgaggaaaaccacgagaacatcatggcttgcgctaagtctccactggagaacacttggtgggctgagcaagatagtccgttctgcttccttgcgttctgctttgagtacgctggggtacggcaccacggcctgagctataactgctcccttccgctggcgtttgacgggtcttgctctggcatccagcacttctccgcgatgctccgagatgaggtaggtggtcgcgcggttaacttgcttcctagtgaaaccgttcaggacatctacgggattgttgctaagaaagtcaacgagattctacaagcagacgcaatcaatgggaccgataacgaagtagttaccgtgaccgatgagaacgaaggtgaaatctctgagaaagtcaagctgggcactaaggcactggctggtcaatggctggcttacggtgttactcgcagtgtgactaagcgttcagtcatgacgctggcttacgggtccaaagagttcggcttccgtcaacaagtgctgcgccacactattcagccagctattgattccggcaagggtctgatgttcactcagccgaatcaggctgctggatacatggctaagctgatttgggaatctgtgagcgtgacggtggtagctgcggttgaagcaatgaactggcttaagtctgctgctaagctgctggctgctgaggtcaaagataagaaaactggagagattcttcgcaagcgttgcgctgtgcattgggtaactcctgatggtttccctgtgtggcaggaatacaagaagcctattcagacgcgcttgaacctgatgttcctcggtcagttccgcttacagcctaccattaacaccaacaaagatagcgagattgatgcacacaaacaggagtctggtatcgctcctaactttgtacacagccaagacggtagccaccttcgtaagactgtagtgtgggcacacgagaagtacggaatcgaatcttttgcactgattcacgactccttcggtaccattccggctgacgctgcgaacctgttcaaagcagtgcgcgaaactatggttgacacatatgagtcttgtgatgtactggctgatttctacgaccagttcgctgaccagttgcacgagtctcaattggacaaaatgccagcacttccggctaaaggtaacttgaacctccgtgacatcttagagtcggacttcgcgttcgcg

SEQ ID NO: 436 - protein, 890 aa, synthetic construct
  REGION 1..890: note = Variant of RNA polymerase
MHHHHHHMNTINIAKNDFSDIELAAIPFNTLADHYGERLAREQLALEHESYEMGEARFRKMFERQLKAGEVADNAAAKPLITTLLPKMIARINDWFEEVKAKRGKRPTAFQFLQEIKPEAVAYITIKTTLACLTSADRTTVQAVASAIGRAIEDEARFGRIRDLEAKHFKKNYEEQLNKRVGHVYKKAFMQVVEADMLSKGLLGGEAWSSWHKEDSIHVGVRCIEMLIESTGMVSLHRQNAGVVGQDSETIELAPEYAEAIATRAGALAGISPMFQPCVVPPKPWTGITGGGYWANGRRPLALVRTHSKKGLMRYEDVYMPEVYKAINIAQNTAWSINKWVLAVANVITKWKHCPVEDIPAIEREELPMKPEDIDMNPEALTAWKRAKAAVYRKDKARKSRRILLEFMLEQANKFANHKAIWFPYNMDWRGRVYAVSMFNPQGNDMTKGLLTLAKGKPIGKEGYYWLKIHGANCAGVDKVPFPERIKFIEENHENIMACAKSPLENTWWAEQDSPFCFLAFCFEYAGVRHHGLSYNCSLPLAFDGSCSGIQHFSAMLRDEVGGRAVNLLPSETVQDIYGIVAKKVNEILQADAINGTDNEVVTVTDENEGEISEKVKLGTKALAGQWLAYGVTRSVTKRSVMTLAYGSKEFGFRQQVLRHTIQPAIDSGKGLMFTQPNQAAGYMAKLIWESVSVTVVAAVEAMNWLKSAAKLLAAEVKDKKTGEILRKRCAVHWVTPDGFPVWQEYKKPIQTRLNLMFLGQFRLQPTINTNKDSEIDAHKQESGIAPNFVHSQDGSHLRKTVVWAHEKYGIESFALIHDSFGTIPADAANLFKAVRETMVDTYESCDVLADFYDQFADQLHESQLDKMPALPAKGNLNLRDILESDFAFA

SEQ ID NO: 437 - DNA, 2670 bp, synthetic construct
  misc_feature 1..2670: note = Variant of RNA polymerase
  source 1..2670: mol_type = other DNA
atgcaccatcaccatcaccatatgaacacgattaacatcgctaagaacgacttctctgacatcgaactggctgctatcccgttcaacactctggctgaccattacggtgagggtttagctcgcgaacagttggcccttgagcatgagtcttacgagatgggtgaagcacgtttccgcaagatgtttgagcgtcaacttaaagctggtgaggttgcggataacgctgccgccaagcctctcatcactaccctactccctaagatgattgcacgcatcaacgactggtttgaggaagtgaaagctaagcgcggcaagcgcccgacagccttccagttcctgcaagaaatcaagccggaagccgtagcgtacatcaccattaagaccactctggcttgcctaaccagtgcggaccgtacaaccgttcaggctgtagcaagcgcaatcggtcgggccattgaggacgaggctcgcttcggtcgtatccgtgaccttgaagctaagcacttcaagaaaaactacgaggaacaactcaacaagcgcgtagggcacgtctacaagaaagcatttatgcaagttgtcgaggctgacatgctctctaagggtctactcggtggcgaggcgtggtcttcgtggcataaggaagactctattcatgtaggagtacgctgcatcgagatgctcattgagtcaaccggaatggttagcttacaccgccaaaatgctggcgtagtaggtcaagactctgagactatcgaactcgcacctgaatacgctgaggctatcgcaacccgtgcaggtgcgctggctggcatctctccgatgttccaaccttgcgtagttcctcctaagccgtggactggcattactggtggtggctattgggctaacggtcgtcgtcctctggcgctggtgcgtactcacagtaagaaaggtctgatgcgctacgaagacgtttacatgcctgaggtgtacaaagcgattaacattgcgcaaaacaccgcctggtcgatcaacaagtgggtcctggcggtcgccaacgtaatcaccaagtggaagcattgtccggtcgaggacatccctgcgattgagcgtgaagaactcccgatgaaaccggaagacatcgacatgaatcctgaggctctcaccgcgtggaaacgtgctaaagctgctgtgtaccgcaaggacaaggctcgcaagtctcgccgtatcttgcttgagttcatgcttgagcaagccaataagtttgctaaccataaggccatctggttcccttacaacatggactggcgcggtcgtgtttacgctgtgtcaatgttcaacccgcaaggtaacgatatgaccaaaggactgcttacgctggcgaaaggtaaaccaatcggtaaggaaggttactactggctgaaaatccacggtgcaaactgtgcgggtgtcgataaggttccgttccctgagcgcatcaagttcattgaggaaaaccacgagaacatcatggcttgcgctaagtctccactggagaacacttggtgggctgagcaagatagtccgttctgcttccttgcgttctgctttgagtacgctggggtacagcaccacggcctgagctataactgctcccttccgctggcgtttgacgggtcttgctctggcatccagcacttctccgcgatgctccgagatgaggtaggtggtcgcgcggttaacttgcttcctagtgaaaccgttcaggacatctacgggattgttgctaagaaagtcaacgagattctacaagcagacgcaatcaatgggaccgataacgaagtagttaccgtgaccgatgagaacccgggtgaaatctctgagaaagtcaagctgggcactaaggcactggctggtcaatggctggcttacggtgttactcgcagtgtgactaagcgttcagtcatgacgctggcttacgggtccaaagagttcggcttccgtcaacaagtgctgcgccacactattcagccagctattgattccggcaagggtctgatgttcactcagccgaatcaggctgctggatacatggctaagctgatttgggaatctgtgagcgtgacggtggtagctgcggttgaagcaatgaactggcttaagtctgctgctaagctgctggctgctgaggtcagtgataagaaaactggagagattcttcgcaagcgttgcgctgtgcattgggtaactcctgatggtttccctgtgtggcaggaatacaagaagcctattcagacgcgcttgaacctgatgttcctcggtcagttccgcttacagcctaccattaacaccaacaaagatagcgagattgatgcacacaaacaggagtctggtatcgctcctaactttgtacacagccaagacggtagccaccttcgtaagactgtagtgtgggcacacgagaagtacggaatcgaatcttttgcactgattcacgactccttcggtaccattccggctgacgctgcgaacctgttcaaagcagtgcgcgaaactatggttgacacatatgagtcttgtgatgtactggctgatttctacgaccagttcgctgaccagttgcacgagtctcaattggacaaaatgccagcacttccggctaaaggtaacttgaacctccgtgacatcttagagtcggacttcgcgttcgcg

SEQ ID NO: 438 - protein, 890 aa, synthetic construct
  REGION 1..890: note = Variant of RNA polymerase
MHHHHHHMNTINIAKNDFSDIELAAIPFNTLADHYGEGLAREQLALEHESYEMGEARFRKMFERQLKAGEVADNAAAKPLITTLLPKMIARINDWFEEVKAKRGKRPTAFQFLQEIKPEAVAYITIKTTLACLTSADRTTVQAVASAIGRAIEDEARFGRIRDLEAKHFKKNYEEQLNKRVGHVYKKAFMQVVEADMLSKGLLGGEAWSSWHKEDSIHVGVRCIEMLIESTGMVSLHRQNAGVVGQDSETIELAPEYAEAIATRAGALAGISPMFQPCVVPPKPWTGITGGGYWANGRRPLALVRTHSKKGLMRYEDVYMPEVYKAINIAQNTAWSINKWVLAVANVITKWKHCPVEDIPAIEREELPMKPEDIDMNPEALTAWKRAKAAVYRKDKARKSRRILLEFMLEQANKFANHKAIWFPYNMDWRGRVYAVSMFNPQGNDMTKGLLTLAKGKPIGKEGYYWLKIHGANCAGVDKVPFPERIKFIEENHENIMACAKSPLENTWWAEQDSPFCFLAFCFEYAGVQHHGLSYNCSLPLAFDGSCSGIQHFSAMLRDEVGGRAVNLLPSETVQDIYGIVAKKVNEILQADAINGTDNEVVTVTDENPGEISEKVKLGTKALAGQWLAYGVTRSVTKRSVMTLAYGSKEFGFRQQVLRHTIQPAIDSGKGLMFTQPNQAAGYMAKLIWESVSVTVVAAVEAMNWLKSAAKLLAAEVSDKKTGEILRKRCAVHWVTPDGFPVWQEYKKPIQTRLNLMFLGQFRLQPTINTNKDSEIDAHKQESGIAPNFVHSQDGSHLRKTVVWAHEKYGIESFALIHDSFGTIPADAANLFKAVRETMVDTYESCDVLADFYDQFADQLHESQLDKMPALPAKGNLNLRDILESDFAFA

SEQ ID NO: 439 - DNA, 2670 bp, synthetic construct
  misc_feature 1..2670: note = Variant of RNA polymerase
  source 1..2670: mol_type = other DNA
atgcaccatcaccatcaccatatgaacacgattaacatcgctaagaacgacttctctgacatcgaactggctgctatcccgttcaacactctggctgaccattacggtgagcgtttagctcgcgaacagttggcccttgagcatgagtcttacgagatgggtgaagcacgtttccgcaagatgtttgagcgtcaacttaaagctggtgaggttgcggataacgctgccgccaagcctctcatcactaccctactccctaagatgattgcacgcatcaacgactggtttgaggaagtgaaagctaagcgcggcaagcgcccgacagccttccagttcctgcaagaaatcaagccggaagccgtagcgtacatcaccattaagaccactctggcttgcctaaccagtgcggaccgtacaaccgttcaggctgtagcaagcgcaatcggtcgggccattgaggacgaggctcgcttcggtcgtatccgtgaccttgaagctaagcacttcaagaaaaactacgaggaacaactcaacaagcgcgtagggcacgtcctgaagctggcatttatgcaagttgtcgaggctgacatgctctctaagggtctactcggtggcgaggcgtggtcttcgtggcataaggaagactctattcatgtaggagtacgctgcatcgagatgctcattgagtcaaccggaatggttagcttacaccgccaaaatgctggcgtagtaggtcaagactctgagactatcgaactcgcacctgaatacgctgaggctatcgcaacccgtgcaggtgcgctggctggcatctctccgatgttccaaccttgcgtagttcctcctaagccgtggactggcattactggtggtggctattgggctaacggtcgtcgtcctctggcgctggtgcgtactcacagtaagaaaggtctgatgcgctacgaagacgtttacatgcctgaggtgtacaaagcgattaacattgcgcaaaacaccgcctggtcgatcaacaagtgggtcctggcggtcgccaacgtaatcaccaagtggaagcattgtccggtcgaggacatccctgcgattgagcgtgaagaactcccgatgaaaccggaagacatcgacatgaatcctgaggctctcaccgcgtggaaacgtgctaaagctgctgtgtaccgcaaggacaaggctcgcaagtctcgccgtatcttgctcgagttcatgcttgagcaagccaataagtttgctaaccataaggccatctggttcccttacaacatggactggcgcggtcgtgtttacgctgtgtcaatgttcaacccgcaaggtaacgatatgaccaaaggactgcttacgctggcgaaaggtaaaccaatcggtaaggaaggttactactggctgaaaatccacggtgcaaactgtgcgggtgtcgataaggttccgttccctgagcgcatcaagttcattgaggaaaaccacgagaacatcatggcttgcgctaagtctccactggagaacacttggtgggctgagcaagatagtccgttctgcttccttgcgttctgctttgagtacgctggggtacagcaccacggcctgagctataactgctcccttccgctggcgtttgacgggtcttgctctggcatccagcacttctccgcgatgctccgagatgaggtaggtggtcgcgcggttaacttgcttcctagtgaaaccgttcaggacatctacgggattgttgctaagaaagtcaacgagattctacaagcagacgcaatcaatgggaccgataacgaagtagttaccgtgaccgatgagaactgcggtgaaatctctgagaaagtcaagctgggcactaaggcactggctggtcaatggctggcttacggtgttactcgcagtgtgactaagcgttcagtcatgacgctggcttacgggtccaaagagttcggcttccgtcaacaagtgctgcgccacactattcagccagctattgattccggcaagggtctgatgttcactcagccgaatcaggctgctggatacatggctaagctgatttgggaatctgtgagcgtgacggtggtagctgcggttgaagcaatgaactggcttaagtctgctgctaagctgctggctgctgaggtcagtgatgccaaaactggagagattcttcgcaagcgttgcgctgtgcattgggtaactcctgatggtttccctgtgtggcaggaatacaagaagcctattcagacgcgcttgaacctgatgttcctcggtcagttccgcttacagcctaccattaacaccaacaaagatagcgagattgatgcacacaaacaggagtctggtatcgctcctaactttgtacacagccaagacggtagccaccttcgtaagactgtagtgtgggcacacgagaagtacggaatcgaatcttttgcactgattcacgactccttcggtaccattccggctgacgctgcgaacctgttcaaagcagtgcgcgaaactatggttgacacatatgagtcttgtgatgtactggctgatttctacgaccagttcgctgaccagttgcacgagtctcaattggacaaaatgccagcacttccggctaaaggtaacttgaacctccgtgacatcttagagtcggacttcgcgttcgcg

SEQ ID NO: 440 - protein, 890 aa, synthetic construct
  REGION 1..890: note = Variant of RNA polymerase
MHHHHHHMNTINIAKNDFSDIELAAIPFNTLADHYGERLAREQLALEHESYEMGEARFRKMFERQLKAGEVADNAAAKPLITTLLPKMIARINDWFEEVKAKRGKRPTAFQFLQEIKPEAVAYITIKTTLACLTSADRTTVQAVASAIGRAIEDEARFGRIRDLEAKHFKKNYEEQLNKRVGHVLKLAFMQVVEADMLSKGLLGGEAWSSWHKEDSIHVGVRCIEMLIESTGMVSLHRQNAGVVGQDSETIELAPEYAEAIATRAGALAGISPMFQPCVVPPKPWTGITGGGYWANGRRPLALVRTHSKKGLMRYEDVYMPEVYKAINIAQNTAWSINKWVLAVANVITKWKHCPVEDIPAIEREELPMKPEDIDMNPEALTAWKRAKAAVYRKDKARKSRRILLEFMLEQANKFANHKAIWFPYNMDWRGRVYAVSMFNPQGNDMTKGLLTLAKGKPIGKEGYYWLKIHGANCAGVDKVPFPERIKFIEENHENIMACAKSPLENTWWAEQDSPFCFLAFCFEYAGVQHHGLSYNCSLPLAFDGSCSGIQHFSAMLRDEVGGRAVNLLPSETVQDIYGIVAKKVNEILQADAINGTDNEVVTVTDENCGEISEKVKLGTKALAGQWLAYGVTRSVTKRSVMTLAYGSKEFGFRQQVLRHTIQPAIDSGKGLMFTQPNQAAGYMAKLIWESVSVTVVAAVEAMNWLKSAAKLLAAEVSDAKTGEILRKRCAVHWVTPDGFPVWQEYKKPIQTRLNLMFLGQFRLQPTINTNKDSEIDAHKQESGIAPNFVHSQDGSHLRKTVVWAHEKYGIESFALIHDSFGTIPADAANLFKAVRETMVDTYESCDVLADFYDQFADQLHESQLDKMPALPAKGNLNLRDILESDFAFA

SEQ ID NO: 441 - DNA, 2670 bp, synthetic construct
  misc_feature 1..2670: note = Variant of RNA polymerase
  source 1..2670: mol_type = other DNA
atgcaccatcaccatcaccatatgaacacgattaacatcgctaagaacgacttctctgacatcgaactggctgctatcccgttcaacactctggctgaccattacggtgagcgtttagctcgcgaacagttggcccttgagcatgagtcttacgagatgggtgaagcacgtttccgcaagatgtttgagcgtcaacttaaagctggtgaggttgcggataacgctgccgccaagcctctcatcactaccctactccctaagatgattgcacgcatcaacgactggtttgaggaagtgaaagctaagcgcggcaagcgcccgacagccttccagttcctgcaagaaatcaagccggaagccgtagcgtacatcaccattaagaccactctggcttgcctaaccagtgcggaccgtacaaccgttcaggctgtagcaagcgcaatcggtcgggccattgaggacgaggctcgcttcggtcgtatccgtgaccttgaagctaagcacttcaagaaaaactacgaggaacaactcaacaagcgcgtagggcacgtcctgaagcacgcatttatgcaagttgtcgaggctgacatgctctctaagggtctactcggtggcgaggcgtggtcttcgtggcataaggaagactctattcatgtaggagtacgctgcatcgagatgctcattgagtcaaccggaatggttagcttacaccgccaaaatgctggcgtagtaggtcaagactctgagactatcgaactcgcacctgaatacgctgaggctatcgcaacccgtgcaggtgcgctggctggcatctctccgatgttccaaccttgcgtagttcctcctaagccgtggactggcattactggtggtggctattgggctaacggtcgtcgtcctctggcgctggtgcgtactcacagtaagaaaggtctgatgcgctacgaagacgtttacatgcctgaggtgtacaaagcgattaacattgcgcaaaacaccgcctggtcgatcaacaagtgggtcctggcggtcgccaacgtaatcaccaagtggaagcattgtccggtcgaggacatccctgcgattgagcgtgaagaactcccgatgaaaccggaagacatcgacatgaatcctgaggctctcaccgcgtggaaacgtgctaaagctgctgtgtaccgcaaggacaaggctcgcaagtctcgccgtatcttgcttgagttcatgcttgagcaagccaataagtttgctaaccataaggccatctggttcccttacaacatggactggcgcggtcgtgtttacgctgtgtcaatgttcaacccgcaaggtaacgatatgaccaaaggactgcttacgctggcgaaaggtaaaccaatcggtaaggaaggttactactggctgaaaatccacggtgcaaactgtgcgggtgtcgataaggttccgttccctgagcgcatcaagttcattgaggaaaaccacgagaacatcatggcttgcgctaagtctccactggagaacacttggtgggctgagcaagatagtccgttctgcttccttgcgttctgctttgagtacgctggggtacagcaccacggcctgagctataactgctcccttccgctggcatttgacgggtcttgctctggcatccagcacttctccgcgatgctccgagatgaggtaggtggtcgcgcggttaacttgcttcctagtgaaaccgttcaggacatctacgggattgttgctaagaaagtcaacgagattctacaagcagacgcaatcaatgggaccgataacgaagtagttaccgtgaccgatgagaactgcggtgaaatctctgagaaagtcaagctgggcactaaggcactggctggtcaatggctggcttacggtgttactcgcagtgtgactaagcgttcagtcatgacgctggcttacgggtccaaagagttcggcttccgtcaacaagtgctgcgccacactattcagccagctattgattccggcaagggtctgatgttcactcagccgaatcaggctgctggatacatggctaagctgatttgggaatctgtgagcgtgacggtggtagctgcggttgaagcaatgaactggcttaagtctgctgctaagctgctggctgctgaggtcagtgataagagcactggagagattcttcgcaagcgttgcgctgtgcattgggtaactcctgatggtttccctgtgtggcaggaatacaagaagcctattcagacgcgcttgaacctgatgttcctcggtcagttccgcttacagcctaccattaacaccaacaaagatagcgagattgatgcacacaaacaggagtctggtatcgctcctaactttgtacacagccaagacggtagccaccttcgtaagactgtagtgtgggcacacgagaagtacggaatcgaatcttttgcactgattcacgactccttcggtaccattccggctgacgctgcgaacctgttcaaagcagtgcgcgaaactatggttgacacatatgagtcttgtgatgtactggctgatttctacgaccagttcgctgaccagttgcacgagtctcaattggacaaaatgccagcacttccggctaaaggtaacttgaacctccgtgacatcttagagtcggacttcgcgttcgcg

SEQ ID NO: 442 - protein, 890 aa, synthetic construct
  REGION 1..890: note = Variant of RNA polymerase
MHHHHHHMNTINIAKNDFSDIELAAIPFNTLADHYGERLAREQLALEHESYEMGEARFRKMFERQLKAGEVADNAAAKPLITTLLPKMIARINDWFEEVKAKRGKRPTAFQFLQEIKPEAVAYITIKTTLACLTSADRTTVQAVASAIGRAIEDEARFGRIRDLEAKHFKKNYEEQLNKRVGHVLKHAFMQVVEADMLSKGLLGGEAWSSWHKEDSIHVGVRCIEMLIESTGMVSLHRQNAGVVGQDSETIELAPEYAEAIATRAGALAGISPMFQPCVVPPKPWTGITGGGYWANGRRPLALVRTHSKKGLMRYEDVYMPEVYKAINIAQNTAWSINKWVLAVANVITKWKHCPVEDIPAIEREELPMKPEDIDMNPEALTAWKRAKAAVYRKDKARKSRRILLEFMLEQANKFANHKAIWFPYNMDWRGRVYAVSMFNPQGNDMTKGLLTLAKGKPIGKEGYYWLKIHGANCAGVDKVPFPERIKFIEENHENIMACAKSPLENTWWAEQDSPFCFLAFCFEYAGVQHHGLSYNCSLPLAFDGSCSGIQHFSAMLRDEVGGRAVNLLPSETVQDIYGIVAKKVNEILQADAINGTDNEVVTVTDENCGEISEKVKLGTKALAGQWLAYGVTRSVTKRSVMTLAYGSKEFGFRQQVLRHTIQPAIDSGKGLMFTQPNQAAGYMAKLIWESVSVTVVAAVEAMNWLKSAAKLLAAEVSDKSTGEILRKRCAVHWVTPDGFPVWQEYKKPIQTRLNLMFLGQFRLQPTINTNKDSEIDAHKQESGIAPNFVHSQDGSHLRKTVVWAHEKYGIESFALIHDSFGTIPADAANLFKAVRETMVDTYESCDVLADFYDQFADQLHESQLDKMPALPAKGNLNLRDILESDFAFA

SEQ ID NO: 443 - DNA, 2670 bp, synthetic construct
  misc_feature 1..2670: note = Variant of RNA polymerase
  source 1..2670: mol_type = other DNA
atgcaccatcaccatcaccatatgaacacgattaacatcgctaagaacgacttctctgacatcgaactggctgctatcccgttcaacactctggctgaccattacggtgagggtttagctcgcgaacagttggcccttgagcatgagtcttacgagatgggtgaagcacgtttccgcaagatgtttgagcgtcaacttaaagctggtgaggttgcggataacgctgccgccaagcctctcatcactaccctactccctaagatgattgcacgcatcaacgactggtttgaggaagtgaaagctaagcgcggcaagcgcccgacagccttccagttcctgcaagaaatcaagccggaagccgtagcgtacatcaccattaagaccactctggcttgcctaaccagtgcggaccgtacaaccgttcaggctgtagcaagcgcaatcggtcgggccattgaggacgaggctcgcttcggtcgtatccgtgaccttgaagctaagcacttcctgaaaaactacgaggaacaactcaacaagcgcgtagggcacgtctacaagaaagcatttatgcaagttgtcgaggctgacatgctctctaagggtctactcggtggcgaggcgtggtcttcgtggcataaggaagactctattcatgtaggagtacgctgcatcgagatgctcattgagtcaaccggaatggttagcttacaccgccaaaatgctggcgtagtaggtcaagactctgagactatcgaactcgcacctgaatacgctgaggctatcgcaacccgtgcaggtgcgctggctggcatctctccgatgttccaaccttgcgtagttcctcctaagccgtggactggcattactggtggtggctattgggctaacggtcgtcgtcctctggcgctggtgcgtactcacagtaagaaaggtctgatgcgctacgaagacgtttacatgcctgaggtgtacaaagcgattaacattgcgcaaaacaccgcctggtcgatcaacaagtgggtcctggcggtcgccaacgtaatcaccaagtggaagcattgtccggtcgaggacatccctgcgattgagcgtgaagaactcccgatgaaaccggaagacatcgacatgaatcctgaggctctcaccgcgtggaaacgtgctaaagctgctgtgtaccgcaaggacaaggctcgcaagtctcgccgtatcttgcttgagttcatgcttgagcaagccaataagtttgctaaccataaggccatctggttcccttacaacatggactggcgcggtcgtgtttacgctgtgtcaatgttcaacccgcaaggtaacgatatgaccaaaggactgcttacgctggcgaaaggtaaaccaatcggtaaggaaggttactactggctgaaaatccacggtgcaaactgtgcgggtgtcgataaggttccgttccctgagcgcatcaagttcattgaggaaaaccacgagaacatcatggcttgcgctaagtctccactggagaacacttggtgggctgagcaagatagtccgttctgcttccttgcgttctgctttgagtacgctggggtacagcaccacggcctgagctataactgctcccttccgctggcgtttgacgggtcttgctctggcatccagcacttctccgcgatgctccgagatgaggtaggtggtcgcgcggttaacttgcttcctagtgaaaccgttcaggacatctacgggattgttgctaagaaagtcaacgagattctacaagcagacgcaatcaatgggaccgataacgaagtagttaccgtgaccgatgagaacactggtgaaatctctgagaaagtcaagctgggcactaaggcactggctggtcaatggctggcttacggtgttactcgcagtgtgactaagcgttcagtcatgacgctggcttacgggtccaaagagttcggcttccgtcaacaagtgctgcgccacactattcagccagctattgattccggcaagggtctgatgttcactcagccgaatcaggctgctggatacatggctaagctgatttgggaatctgtgagcgtgacggtggtagctgcggttgaagcaatgaactggcttaagtctgctgctaagctgctggctgctgaggtcagtgatgccagcactggagagattcttcgcaagcgttgcgctgtgcattgggtaactcctgatggtttccctgtgtggcaggaatacaagaagcctattcagacgcgcttgaacctgatgttcctcggtcagttccgcttacagcctaccattaacaccaacaaagatagcgagattgatgcacacaaacaggagtctggtatcgctcctaactttgtacacagccaagacggtagccaccttcgtaagactgtagtgtgggcacacgagaagtacggaatcgaatcttttgcactgattcacgactccttcggtaccattccggctgacgctgcgaacctgttcaaagcagtgcgcgaaactatggttgacacatatgagtcttgtgatgtactggctgatttctacgaccagttcgctgaccagttgcacgagtctcaattggacaaaatgccagcacttccggctaaaggtaacttgaacctccgtgacatcttagagtcggacttcgcgttcgcg

SEQ ID NO: 444 - protein, 890 aa, synthetic construct
  REGION 1..890: note = Variant of RNA polymerase
MHHHHHHMNTINIAKNDFSDIELAAIPFNTLADHYGEGLAREQLALEHESYEMGEARFRKMFERQLKAGEVADNAAAKPLITTLLPKMIARINDWFEEVKAKRGKRPTAFQFLQEIKPEAVAYITIKTTLACLTSADRTTVQAVASAIGRAIEDEARFGRIRDLEAKHFLKNYEEQLNKRVGHVYKKAFMQVVEADMLSKGLLGGEAWSSWHKEDSIHVGVRCIEMLIESTGMVSLHRQNAGVVGQDSETIELAPEYAEAIATRAGALAGISPMFQPCVVPPKPWTGITGGGYWANGRRPLALVRTHSKKGLMRYEDVYMPEVYKAINIAQNTAWSINKWVLAVANVITKWKHCPVEDIPAIEREELPMKPEDIDMNPEALTAWKRAKAAVYRKDKARKSRRILLEFMLEQANKFANHKAIWFPYNMDWRGRVYAVSMFNPQGNDMTKGLLTLAKGKPIGKEGYYWLKIHGANCAGVDKVPFPERIKFIEENHENIMACAKSPLENTWWAEQDSPFCFLAFCFEYAGVQHHGLSYNCSLPLAFDGSCSGIQHFSAMLRDEVGGRAVNLLPSETVQDIYGIVAKKVNEILQADAINGTDNEVVTVTDENTGEISEKVKLGTKALAGQWLAYGVTRSVTKRSVMTLAYGSKEFGFRQQVLRHTIQPAIDSGKGLMFTQPNQAAGYMAKLIWESVSVTVVAAVEAMNWLKSAAKLLAAEVSDASTGEILRKRCAVHWVTPDGFPVWQEYKKPIQTRLNLMFLGQFRLQPTINTNKDSEIDAHKQESGIAPNFVHSQDGSHLRKTVVWAHEKYGIESFALIHDSFGTIPADAANLFKAVRETMVDTYESCDVLADFYDQFADQLHESQLDKMPALPAKGNLNLRDILESDFAFA

SEQ ID NO: 445 - DNA, 2670 bp, synthetic construct
  misc_feature 1..2670: note = Variant of RNA polymerase
  source 1..2670: mol_type = other DNA
atgcaccatcaccatcaccatatgaacacgattaacatcgctaagaacgacttctctgacatcgaactggctgctatcccgttcaacactctggctgaccattacggtgagcgtttagctcgcgaacagttggcccttgagcatgagtcttacgagatgggtgaagcacgtttccgcaagatgtttgagcgtcaacttaaagctggtgaggttgcggataacgctgccgccaagcctctcatcactaccctactccctaagatgattgcacgcatcaacgactggtttgaggaagtgaaagctaagcgcggcaagcgcccgacagccttccagttcctgcaagaaatcaagccggaagccgtagcgtacatcaccattaagaccactctggcttgcctaaccagtgcggaccgtacaaccgttcaggctgtagcaagcgcaatcggtcgggccattgaggacgaggctcgcttcggtcgtatccgtgaccttgaagctaagcacttcctgaaaaactacgaggaacaactcaacaagcgcgtagggcacgtcctgaagctggcatttatgcaagttgtcgaggctgacatgctctctaagggtctactcggtggcgaggcgtggtcttcgtggcataaggaagactctattcatgtaggagtacgctgcatcgagatgctcattgagtcaaccggaatggttagcttacaccgccaaaatgctggcgtagtaggtcaagactctgagactatcgaactcgcacctgaatacgctgaggctatcgcaacccgtgcaggtgcgctggctggcatctctccgatgttccaaccttgcgtagttcctcctaagccgtggactggcattactggtggtggctattgggctaacggtcgtcgtcctctggcgctggtgcgtactcacagtaagaaaggtctgatgcgctacgaagacgtttacatgcctgaggtgtacaaagcgattaacattgcgcaaaacaccgcctggtcgatcaacaagtgggtcctggcggtcgccaacgtaatcaccaagtggaagcattgtccggtcgaggacatccctgcgattgagcgtgaagaactcccgatgaaaccggaagacatcgacatgaatcctgaggctctcaccgcgtggaaacgtgctaaagctgctgtgtaccgcaaggacaaggctcgcaagtctcgccgtatcttgcttgagttcatgcttgagcaagccaataagtttgctaaccataaggccatctggttcccttacaacatggactggcgcggtcgtgtttacgctgtgtcaatgttcaacccgcaaggtaacgatatgaccaaaggactgcttacgctggcgaaaggtaaaccaatcggtaaggaaggttactactggctgaaaatccacggtgcaaactgtgcgggtgtcgataaggttccgttccctgagcgcatcaagttcattgaggaaaaccacgagaacatcatggcttgcgctaagtctccactggagaacacttggtgggctgagcaagatagtccgttctgcttccttgcgttctgctttgagtacgctggggtacagcaccacggcctgagctataactgctcccttccgctggcgtttgacgggtcttgctctggcatccagcacttctccgcgatgctccgagatgaggtaggtggtcgcgcggttaacttgcttcctagtgaaaccgttcaggacatctacgggattgttgctaagaaagtcaacgagattctacaagcagacgcaatcaatgggaccgataacgaagtagttaccgtgaccgatgagaacactggtgaaatctctgagaaagtcaagctgggcactaaggcactggctggtcaatggctggcttacggtgttactcgcagtgtgactaagcgttcagtcatgacgctggcttacgggtccaaagagttcggcttccgtcaacaagtgctgcgccacactattcagccagctattgattccggcaagggtctgatgttcactcagccgaatcaggctgctggatacatggctaagctgatttgggaatctgtgagcgtgacggtggtagctgcggttgaagcaatgaactggcttaagtctgctgctaagctgctggctgctgaggtcagtgatgccaaaactggagagattcttcgcaagcgttgcgctgtgcattgggtaactcctgatggtttccctgtgtggcaggaatacaagaagcctattcagacgcgcttgaacctgatgttcctcggtcagttccgcttacagcctaccattaacaccaacaaagatagcgagattgatgcacacaaacaggagtctggtatcgctcctaactttgtacacagccaagacggtagccaccttcgtaagactgtagtgtgggcacacgagaagtacggaatcgaatcttttgcactgattcacgactccttcggtaccattccggctgacgctgcgaacctgttcaaagcagtgcgcgaaactatggttgacacatatgagtcttgtgatgtactggctgatttctacgaccagttcgctgaccagttgcacgagtctcaattggacaaaatgccagcacttccggctaaaggtaacttgaacctccgtgacatcttagagtcggacttcgcgttcgcg

SEQ ID NO: 446 - protein, 890 aa, synthetic construct
  REGION 1..890: note = Variant of RNA polymerase
MHHHHHHMNTINIAKNDFSDIELAAIPFNTLADHYGERLAREQLALEHESYEMGEARFRKMFERQLKAGEVADNAAAKPLITTLLPKMIARINDWFEEVKAKRGKRPTAFQFLQEIKPEAVAYITIKTTLACLTSADRTTVQAVASAIGRAIEDEARFGRIRDLEAKHFLKNYEEQLNKRVGHVLKLAFMQVVEADMLSKGLLGGEAWSSWHKEDSIHVGVRCIEMLIESTGMVSLHRQNAGVVGQDSETIELAPEYAEAIATRAGALAGISPMFQPCVVPPKPWTGITGGGYWANGRRPLALVRTHSKKGLMRYEDVYMPEVYKAINIAQNTAWSINKWVLAVANVITKWKHCPVEDIPAIEREELPMKPEDIDMNPEALTAWKRAKAAVYRKDKARKSRRILLEFMLEQANKFANHKAIWFPYNMDWRGRVYAVSMFNPQGNDMTKGLLTLAKGKPIGKEGYYWLKIHGANCAGVDKVPFPERIKFIEENHENIMACAKSPLENTWWAEQDSPFCFLAFCFEYAGVQHHGLSYNCSLPLAFDGSCSGIQHFSAMLRDEVGGRAVNLLPSETVQDIYGIVAKKVNEILQADAINGTDNEVVTVTDENTGEISEKVKLGTKALAGQWLAYGVTRSVTKRSVMTLAYGSKEFGFRQQVLRHTIQPAIDSGKGLMFTQPNQAAGYMAKLIWESVSVTVVAAVEAMNWLKSAAKLLAAEVSDAKTGEILRKRCAVHWVTPDGFPVWQEYKKPIQTRLNLMFLGQFRLQPTINTNKDSEIDAHKQESGIAPNFVHSQDGSHLRKTVVWAHEKYGIESFALIHDSFGTIPADAANLFKAVRETMVDTYESCDVLADFYDQFADQLHESQLDKMPALPAKGNLNLRDILESDFAFA

SEQ ID NO: 447 - DNA, 2670 bp, synthetic construct
  misc_feature 1..2670: note = Variant of RNA polymerase
  source 1..2670: mol_type = other DNA
atgcaccatcaccatcaccatatgaacacgattaacatcgctaagaacgacttctctgacatcgaactggctgctatcccgttcaacactctggctgaccattacggtgagggtttagctcgcgaacagttggcccttgagcatgagtcttacgagatgggtgaagcacgtttccgcaagatgtttgagcgtcaacttaaagctggtgaggttgcggataacgctgccgccaagcctctcatcactaccctactccctaagatgattgcacgcatcaacgactggtttgaggaagtgaaagctaagcgcggcaagcgcccgacagccttccagttcctgcaagaaatcaagccggaagccgtagcgtacatcaccattaagaccactctggcttgcctaaccagtgcggaccgtacaaccgttcaggctgtagcaagcgcaatcggtcgggccattgaggacgaggctcgcttcggtcgtatccgtgaccttgaagctaagcacttcaagaaaaacgttgaggaacaactcaacaagcgcgtagggcacgtcctgaagctggcatttatgcaagttgtcgaggctgacatgctctctaagggtctactcggtggcgaggcgtggtcttcgtggcataaggaagactctattcatgtaggagtacgctgcatcgagatgctcattgagtcaaccggaatggttagcttacaccgccaaaatgctggcgtagtaggtgttgactctgagactatcgaactcgcacctgaatacgctgaggctatcgcaacccgtgcaggtgcgctggctggcatctctccgatgttccaaccttgcgtagttcctcctaagccgtggactggcattactggtggtggctattgggctaacggtcgtcgtcctctggcgctggtgcgtactcacagtaagaaaggtctgatgcgctacgaagacgtttacatgcctgaggtgtacaaagcgattaacattgcgcaaaacaccgcctggtcgatcaacaagtgggtcctggcggtcgccaacgtaatcaccaagtggaagcattgtccggtcgaggacatccctgcgattgagcgtgaagaactcccgatgaaaccggaagacatcgacatgaatcctgaggctctcaccgcgtggaaacgtgctaaagctgctgtgtaccgcaaggacaaggctcgcaagtctcgccgtatcttgcttgagttcatgcttgagcaagccaataagtttgctaaccataaggccatctggttcccttacaacatggactggcgcggtcgtgtttacgctgtgtcaatgttcaacccgcaaggtaacgatatgaccaaaggactgcttacgctggcgaaaggtaaaccaatcggtaaggaaggttactactggctgaaaatccacggtgcaaactgtgcgggtgtcgataaggttccgttccctgagcgcatcaagttcattgaggaaaaccacgagaacatcatggcttgcgctaagtctccactggagaacacttggtgggctgagcaagatagtccgttctgcttccttgcgttctgctttgagtacgctggggtacagcaccacggcctgagctataactgctcccttccgctggcgtttgacgggtcttgctctggcatccagcacttctccgcgatgctccgagatgaggtaggtggtcgcgcggttaacttgcttcctagtgaaaccgttcaggacatctacgggattgttgctaagaaagtcaacgagattctacaagcagacgcaatcaatgggaccgataacgaagtagttaccgtgaccgatgagaacgaaggtgaaatctctgagaaagtcaagctgggcactaaggcactggctggtcaatggctggcttacggtgttactcgcagtgtgactaagcgttcagtcatgacgctggcttacgggtccaaagagttcggcttccgtcaacaagtgctgcgccacactattcagccagctattgattccggcaagggtctgatgttcactcagccgaatcaggctgctggatacatggctaagctgatttgggaatctgtgagcgtgacggtggtagctgcggttgaagcaatgaactggcttaagtctgctgctaagctgctggctgctgaggtcaaagatgccaaaactggagagattcttcgcaagcgttgcgctgtgcattgggtaactcctgatggtttccctgtgtggcaggaatacaagaagcctattcagacgcgcttgaacctgatgttcctcggtcagttccgcttacagcctaccattaacaccaacaaagatagcgagattgatgcacacaaacaggagtctggtatcgctcctaactttgtacacagccaagacggtagccaccttcgtaagactgtagtgtgggcacacgagaagtacggaatcgaatcttttgcactgattcacgactccttcggtaccattccggctgacgctgcgaacctgttcaaagcagtgcgcgaaactatggttgacacatatgagtcttgtgatgtactggctgatttctacgaccagttcgctgaccagttgcacgagtctcaattggacaaaatgccagcacttccggctaaaggtaacttgaacctccgtgacatcttagagtcggacttcgcgttcgcg

SEQ ID NO: 448 - protein, 890 aa, synthetic construct
  REGION 1..890: note = Variant of RNA polymerase
MHHHHHHMNTINIAKNDFSDIELAAIPFNTLADHYGEGLAREQLALEHESYEMGEARFRKMFERQLKAGEVADNAAAKPLITTLLPKMIARINDWFEEVKAKRGKRPTAFQFLQEIKPEAVAYITIKTTLACLTSADRTTVQAVASAIGRAIEDEARFGRIRDLEAKHFKKNVEEQLNKRVGHVLKLAFMQVVEADMLSKGLLGGEAWSSWHKEDSIHVGVRCIEMLIESTGMVSLHRQNAGVVGVDSETIELAPEYAEAIATRAGALAGISPMFQPCVVPPKPWTGITGGGYWANGRRPLALVRTHSKKGLMRYEDVYMPEVYKAINIAQNTAWSINKWVLAVANVITKWKHCPVEDIPAIEREELPMKPEDIDMNPEALTAWKRAKAAVYRKDKARKSRRILLEFMLEQANKFANHKAIWFPYNMDWRGRVYAVSMFNPQGNDMTKGLLTLAKGKPIGKEGYYWLKIHGANCAGVDKVPFPERIKFIEENHENIMACAKSPLENTWWAEQDSPFCFLAFCFEYAGVQHHGLSYNCSLPLAFDGSCSGIQHFSAMLRDEVGGRAVNLLPSETVQDIYGIVAKKVNEILQADAINGTDNEVVTVTDENEGEISEKVKLGTKALAGQWLAYGVTRSVTKRSVMTLAYGSKEFGFRQQVLRHTIQPAIDSGKGLMFTQPNQAAGYMAKLIWESVSVTVVAAVEAMNWLKSAAKLLAAEVKDAKTGEILRKRCAVHWVTPDGFPVWQEYKKPIQTRLNLMFLGQFRLQPTINTNKDSEIDAHKQESGIAPNFVHSQDGSHLRKTVVWAHEKYGIESFALIHDSFGTIPADAANLFKAVRETMVDTYESCDVLADFYDQFADQLHESQLDKMPALPAKGNLNLRDILESDFAFA

SEQ ID NO: 449 - DNA, 2670 bp, synthetic construct
  misc_feature 1..2670: note = Variant of RNA polymerase
  source 1..2670: mol_type = other DNA
atgcaccatcaccatcaccatatgaacacgattaacatcgctaagaacgacttctctgacatcgaactggctgctatcccgttcaacactctggctgaccattacggtgagcgtttagctcgcgaacagttggcccttgagcatgagtcttacgagatgggtgaagcacgtttccgcaagatgtttgagcgtcaacttaaagctggtgaggttgcggataacgctgccgccaagcctctcatcactaccctactccctaagatgattgcacgcatcaacgactggtttgaggaagtgaaagctaagcgcggcaagcgcccgacagccttccagttcctgcaagaaatcaagccggaagccgtagcgtacatcaccattaagaccactctggcttgcctaaccagtgcggaccgtacaaccgttcaggctgtagcaagcgcaatcggtcgggccattgaggacgaggctcgcttcggtcgtatccgtgaccttgaagctaagcacttcaagaaaaactacgaggaacaactcaacaagcgcgtagggcacgtctacaagaaagcatttatgcaagttgtcgaggctgacatgctctctaagggtctactcggtggcgaggcgtggtcttcgtggcataaggaagactctattcatgtaggagtacgctgcatcgagatgctcattgagtcaaccggaatggttagcttacaccgccaaaatgctggcgtagtaggtcaagactctgagactatcgaactcgcacctgaatacgctgaggctatcgcaacccgtgcaggtgcgctggctggcatctctccgatgttccaaccttgcgtagttcctcctaagccgtggactggcattactggtggtggctattgggctaacggtcgtcgtcctctggcgctggtgcgtactcacagtaagaaaggtctgatgcgctacgaagacgtttacatgcctgaggtgtacaaagcgattaacattgcgcaaaacaccgcctggtcgatcaacaagtgggtcctggcggtcgccaacgtaatcaccaagtggaagcattgtccggtcgaggacatccctgcgattgagcgtgaagaactcccgatgaaaccggaagacatcgacatgaatcctgaggctctcaccgcgtggaaacgtgctaaagctgctgtgtaccgcaaggacaaggctcgcaagtctcgccgtatcttgcttgagttcatgcttgagcaagccaataagtttgctaaccataaggccatctggttcccttacaacatggactggcgcggtcgtgtttacgctgtgtcaatgttcaacccgcaaggtaacgatatgaccaaaggactgcttacgctggcgaaaggtaaaccaatcggtaaggaaggttactactggctgaaaatccacggtgcaaactgtgcgggtgtcgataaggttccgttccctgagcgcatcaagttcattgaggaaaaccacgagaacatcatggcttgcgctaagtctccactggagaacacttggtgggctgagcaagatagtccgttctgcttccttgcgttctgctttgagtacgctggggtacagcaccacggcctgagctataactgctcccttccgctggcgtttgacgggtcttgctctggcatccagcacttctccgcgatgctccgagatgaggtaggtggtcgcgcggttaacttgcttcctagtgaaaccgttcaggacatctacgggattgttgctaagaaagtcaacgagattctacaagcagacgcaatcaatgggaccgataacgaagtagttaccgtgaccgatgagaacgaaggtgaaatctctgagaaagtcaagctgggcactaaggcactggctggtcaatggctggcttacggtgttactcgcagtgtgactaagcgttcagtcatgacgctggcttacgggtccaaagagttcggcttccgtcaacaagtgctgcgccacactattcagccagctattgattccggcaagggtctgatgttcactcagccgaatcaggctgctggatacatggctaagctgatttgggaatctgtgagcgtgacggtggtagctgcggttgaagcaatgaactggcttaagtctgctgctaagctgctggctgctgaggtcagtgatgccaaaactggagagattcttcgcaagcgttgcgctgtgcattgggtaactcctgatggtttccctgtgtggcaggaatacaagaagcctattcagacgcgcttgaacctgatgttcctcggtcagttccgcttacagcctaccattaacaccaacaaagatagcgagattgatgcacacaaacaggagtctggtatcgctcctaactttgtacacagccaagacggtagccaccttcgtaagactgtagtgtgggcacacgagaagtacggaatcgaatcttttgcactgattcacgactccttcggtaccattccggctgacgctgcgaacctgttcaaagcagtgcgcgaaactatggttgacacatatgagtcttgtgatgtactggctgatttctacgaccagttcgctgaccagttgcacgagtctcaattggacaaaatgccagcacttccggctaaaggtaacttgaacctccgtgacatcttagagtcggacttcgcgttcgcg

SEQ ID NO: 450 - protein, 890 aa, synthetic construct
  REGION 1..890: note = Variant of RNA polymerase
MHHHHHHMNTINIAKNDFSDIELAAIPFNTLADHYGERLAREQLALEHESYEMGEARFRKMFERQLKAGEVADNAAAKPLITTLLPKMIARINDWFEEVKAKRGKRPTAFQFLQEIKPEAVAYITIKTTLACLTSADRTTVQAVASAIGRAIEDEARFGRIRDLEAKHFKKNYEEQLNKRVGHVYKKAFMQVVEADMLSKGLLGGEAWSSWHKEDSIHVGVRCIEMLIESTGMVSLHRQNAGVVGQDSETIELAPEYAEAIATRAGALAGISPMFQPCVVPPKPWTGITGGGYWANGRRPLALVRTHSKKGLMRYEDVYMPEVYKAINIAQNTAWSINKWVLAVANVITKWKHCPVEDIPAIEREELPMKPEDIDMNPEALTAWKRAKAAVYRKDKARKSRRILLEFMLEQANKFANHKAIWFPYNMDWRGRVYAVSMFNPQGNDMTKGLLTLAKGKPIGKEGYYWLKIHGANCAGVDKVPFPERIKFIEENHENIMACAKSPLENTWWAEQDSPFCFLAFCFEYAGVQHHGLSYNCSLPLAFDGSCSGIQHFSAMLRDEVGGRAVNLLPSETVQDIYGIVAKKVNEILQADAINGTDNEVVTVTDENEGEISEKVKLGTKALAGQWLAYGVTRSVTKRSVMTLAYGSKEFGFRQQVLRHTIQPAIDSGKGLMFTQPNQAAGYMAKLIWESVSVTVVAAVEAMNWLKSAAKLLAAEVSDAKTGEILRKRCAVHWVTPDGFPVWQEYKKPIQTRLNLMFLGQFRLQPTINTNKDSEIDAHKQESGIAPNFVHSQDGSHLRKTVVWAHEKYGIESFALIHDSFGTIPADAANLFKAVRETMVDTYESCDVLADFYDQFADQLHESQLDKMPALPAKGNLNLRDILESDFAFA

SEQ ID NO: 451 - DNA, 2670 bp, synthetic construct
  misc_feature 1..2670: note = Variant of RNA polymerase
  source 1..2670: mol_type = other DNA
atgcaccatcaccatcaccatatgaacacgattaacatcgctaagaacgacttctctgacatcgaactggctgctatcccgttcaacactctggctgaccattacggtgagcgtttagctcgcgaacagttggcccttgagcatgagtcttacgagatgggtgaagcacgtttccgcaagatgtttgagcgtcaacttaaagctggtgaggttgcggataacgctgccgccaagcctctcatcactaccctactccctaagatgattgcacgcatcaacgactggtttgaggaagtgaaagctaagcgcggcaagcgcccgacagccttccagttcctgcaagaaatcaagccggaagccgtagcgtacatcaccattaagaccactctggcttgcctaaccagtgcggaccgtacaaccgttcaggctgtagcaagcgcaatcggtcgggccattgaggacgaggctcgcttcggtcgtatccgtgaccttgaagctaagcacttcctgaaaaactacgaggaacaactcaacaagcgcgtagggcacgtcctgaagcacgcatttatgcaagttgtcgaggctgacatgctctctaagggtctactcggtggcgaggcgtggtcttcgtggcataaggaagactctattcatgtaggagtacgctgcatcgagatgctcattgagtcaaccggaatggttagcttacaccgccaaaatgctggcgtagtaggtcaagactctgagactatcgaactcgcacctgaatacgctgaggctatcgcaacccgtgcaggtgcgctggctggcatctctccgatgttccaaccttgcgtagttcctcctaagccgtggactggcattactggtggtggctattgggctaacggtcgtcgtcctctggcgctggtgcgtactcacagtaagaaaggtctgatgcgctacgaagacgtttacatgcctgaggtgtacaaagcgattaacattgcgcaaaacaccgcctggtcgatcaacaagtgggtcctggcggtcgccaacgtaatcaccaagtggaagcattgtccggtcgaggacatccctgcgattgagcgtgaagaactcccgatgaaaccggaagacatcgacatgaatcctgaggctctcaccgcgtggaaacgtgctaaagctgctgtgtaccgcaaggacaaggctcgcaagtctcgccgtatcttgcttgagttcatgcttgagcaagccaataagtttgctaaccataaggccatctggttcccttacaacatggactggcgcggtcgtgtttacgctgtgtcaatgttcaacccgcaaggtaacgatatgaccaaaggactgcttacgctggcgaaaggtaaaccaatcggtaaggaaggttactactggctgaaaatccacggtgcaaactgtgcgggtgtcgataaggttccgttccctgagcgcatcaagttcattgaggaaaaccacgagaacatcatggcttgcgctaagtctccactggagaacacttggtgggctgagcaagatagtccgttctgcttccttgcgttctgctttgagtacgctggggtacagcaccacggcctgagctataactgctcccttccgctggcgtttgacgggtcttgctctggcatccagcacttctccgcgatgctccgagatgaggtaggtggtcgcgcggttaacttgcttcctagtgaaaccgttcaggacatctacgggattgttgctaagaaagtcaacgagattctacaagcagacgcaatcaatgggaccgataacgaagtagttaccgtgaccgatgagaacacgggtgaaatctctgagaaagtcaagctgggcactaaggcactggctggtcaatggctggcttacggtgttactcgcagtgtgactaagcgttcagtcatgacgctggcttacgggtccaaagagttcggcttccgtcaacaagtgctgcgccacactattcagccagctattgattccggcaagggtctgatgttcactcagccgaatcaggctgctggatacatggctaagctgatttgggaatctgtgagcgtgacggtggtagctgcggttgaagcaatgaactggcttaagtctgctgctaagctgctggctgctgaggtcagtgatgccagcactggagagattcttcgcaagcgttgcgctgtgcattgggtaactcctgatggtttccctgtgtggcaggaatacaagaagcctattcagacgcgcttgaacctgatgttcctcggtcagttccgcttacagcctaccattaacaccaacaaagatagcgagattgatgcacacaaacaggagtctggtatcgctcctaactttgtacacagccaagacggtagccaccttcgtaagactgtagtgtgggcacacgagaagtacggaatcgaatcttttgcactgattcacgactccttcggtaccattccggctgacgctgcgaacctgttcaaagcagtgcgcgaaactatggttgacacatatgagtcttgtgatgtactggctgatttctacgaccagttcgctgaccagttgcacgagtctcaattggacaaaatgccagcacttccggctaaaggtaacttgaacctccgtgacatcttagagtcggacttcgcgttcgcg

SEQ ID NO: 452 - protein, 890 aa, synthetic construct
  REGION 1..890: note = Variant of RNA polymerase
MHHHHHHMNTINIAKNDFSDIELAAIPFNTLADHYGERLAREQLALEHESYEMGEARFRKMFERQLKAGEVADNAAAKPLITTLLPKMIARINDWFEEVKAKRGKRPTAFQFLQEIKPEAVAYITIKTTLACLTSADRTTVQAVASAIGRAIEDEARFGRIRDLEAKHFLKNYEEQLNKRVGHVLKHAFMQVVEADMLSKGLLGGEAWSSWHKEDSIHVGVRCIEMLIESTGMVSLHRQNAGVVGQDSETIELAPEYAEAIATRAGALAGISPMFQPCVVPPKPWTGITGGGYWANGRRPLALVRTHSKKGLMRYEDVYMPEVYKAINIAQNTAWSINKWVLAVANVITKWKHCPVEDIPAIEREELPMKPEDIDMNPEALTAWKRAKAAVYRKDKARKSRRILLEFMLEQANKFANHKAIWFPYNMDWRGRVYAVSMFNPQGNDMTKGLLTLAKGKPIGKEGYYWLKIHGANCAGVDKVPFPERIKFIEENHENIMACAKSPLENTWWAEQDSPFCFLAFCFEYAGVQHHGLSYNCSLPLAFDGSCSGIQHFSAMLRDEVGGRAVNLLPSETVQDIYGIVAKKVNEILQADAINGTDNEVVTVTDENTGEISEKVKLGTKALAGQWLAYGVTRSVTKRSVMTLAYGSKEFGFRQQVLRHTIQPAIDSGKGLMFTQPNQAAGYMAKLIWESVSVTVVAAVEAMNWLKSAAKLLAAEVSDASTGEILRKRCAVHWVTPDGFPVWQEYKKPIQTRLNLMFLGQFRLQPTINTNKDSEIDAHKQESGIAPNFVHSQDGSHLRKTVVWAHEKYGIESFALIHDSFGTIPADAANLFKAVRETMVDTYESCDVLADFYDQFADQLHESQLDKMPALPAKGNLNLRDILESDFAFA

SEQ ID NO: 453 - DNA, 2670 bp, synthetic construct
  misc_feature 1..2670: note = Variant of RNA polymerase
  source 1..2670: mol_type = other DNA
atgcaccatcaccatcaccatatgaacacgattaacatcgctaagaacgacttctctgacatcgaactggctgctatcccgttcaacactctggctgaccattacggtgagggtttagctcgcgaacagttggcccttgagcatgagtcttacgagatgggtgaagcacgtttccgcaagatgtttgagcgtcaacttaaagctggtgaggttgcggataacgctgccgccaagcctctcatcactaccctactccctaagatgattgcacgcatcaacgactggtttgaggaagtgaaagctaagcgcggcaagcgcccgacagccttccagttcctgcaagaaatcaagccggaagccgtagcgtacatcaccattaagaccactctggcttgcctaaccagtgcggaccgtacaaccgttcaggctgtagcaagcgcaatcggtcgggccattgaggacgaggctcgcttcggtcgtatccgtgaccttgaagctaagcacttcctgaaaaacgttgaggaacaactcaacaagcgcgtagggcacgtctacaagaaagcatttatgcaagttgtcgaggctgacatgctctctaagggtctactcggtggcgaggcgtggtcttcgtggcataaggaagactctattcatgtaggagtacgctgcatcgagatgctcattgagtcaaccggaatggttagcttacaccgccaaaatgctggcgtagtaggtgttgactctgagactatcgaactcgcacctgaatacgctgaggctatcgcaacccgtgcaggtgcgctggctggcatctctccgatgttccaaccttgcgtagttcctcctaagccgtggactggcattactggtggtggctattgggctaacggtcgtcgtcctctggcgctggtgcgtactcacagtaagaaaggtctgatgcgctacgaagacgtttacatgcctgaggtgtacaaagcgattaacattgcgcaaaacaccgcctggtcgatcaacaagtgggtcctggcggtcgccaacgtaatcaccaagtggaagcattgtccggtcgaggacatccctgcgattgagcgtgaagaactcccgatgaaaccggaagacatcgacatgaatcctgaggctctcaccgcgtggaaacgtgctaaagctgctgtgtaccgcaaggacaaggctcgcaagtctcgccgtatcttgcttgagttcatgcttgagcaagccaataagtttgctaaccataaggccatctggttcccttacaacatggactggcgcggtcgtgtttacgctgtgtcaatgttcaacccgcaaggtaacgatatgaccaaaggactgcttacgctggcgaaaggtaaaccaatcggtaaggaaggttactactggctgaaaatccacggtgcaaactgtgcgggtgtcgataaggttccgttccctgagcgcatcaagttcattgaggaaaaccacgagaacatcatggcttgcgctaagtctccactggagaacacttggtgggctgagcaagatagtccgttctgcttccttgcgttctgctttgagtacgctggggtacagcaccacggcctgagctataactgctcccttccgctggcgtttgacgggtcttgctctggcatccagcacttctccgcgatgctccgagatgaggtaggtggtcgcgcggttaacttgcttcctagtgaaaccgttcaggacatctacgggattgttgctaagaaagtcaacgagattctacaagcagacgcaatcaatgggaccgataacgaagtagttaccgtgaccgatgagaacgaaggtgaaatctctgagaaagtcaagctgggcactaaggcactggctggtcaatggctggcttacggtgttactcgcagtgtgactaagcgttcagtcatgacgctggcttacgggtccaaagagttcggcttccgtcaacaagtgctgcgccacactattcagccagctattgattccggcaagggtctgatgttcactcagccgaatcaggctgctggatacatggctaagctgatttgggaatctgtgagcgtgacggtggtagctgcggttgaagcaatgaactggcttaagtctgctgctaagctgctggctgctgaggtcagtgataagaaaactggagagattcttcgcaagcgttgcgctgtgcattgggtaactcctgatggtttccctgtgtggcaggaatacaagaagcctattcagacgcgcttgaacctgatgttcctcggtcagttccgcttacagcctaccattaacaccaacaaagatagcgagattgatgcacacaaacaggagtctggtatcgctcctaactttgtacacagccaagacggtagccaccttcgtaagactgtagtgtgggcacacgagaagtacggaatcgaatcttttgcactgattcacgactccttcggtaccattccggctgacgctgcgaacctgttcaaagcagtgcgcgaaactatggttgacacatatgagtcttgtgatgtactggctgatttctacgaccagttcgctgaccagttgcacgagtctcaattggacaaaatgccagcacttccggctaaaggtaacttgaacctccgtgacatcttagagtcggacttcgcgttcgcg

SEQ ID NO: 454 - protein, 890 aa, synthetic construct
  REGION 1..890: note = Variant of RNA polymerase
MHHHHHHMNTINIAKNDFSDIELAAIPFNTLADHYGEGLAREQLALEHESYEMGEARFRKMFERQLKAGEVADNAAAKPLITTLLPKMIARINDWFEEVKAKRGKRPTAFQFLQEIKPEAVAYITIKTTLACLTSADRTTVQAVASAIGRAIEDEARFGRIRDLEAKHFLKNVEEQLNKRVGHVYKKAFMQVVEADMLSKGLLGGEAWSSWHKEDSIHVGVRCIEMLIESTGMVSLHRQNAGVVGVDSETIELAPEYAEAIATRAGALAGISPMFQPCVVPPKPWTGITGGGYWANGRRPLALVRTHSKKGLMRYEDVYMPEVYKAINIAQNTAWSINKWVLAVANVITKWKHCPVEDIPAIEREELPMKPEDIDMNPEALTAWKRAKAAVYRKDKARKSRRILLEFMLEQANKFANHKAIWFPYNMDWRGRVYAVSMFNPQGNDMTKGLLTLAKGKPIGKEGYYWLKIHGANCAGVDKVPFPERIKFIEENHENIMACAKSPLENTWWAEQDSPFCFLAFCFEYAGVQHHGLSYNCSLPLAFDGSCSGIQHFSAMLRDEVGGRAVNLLPSETVQDIYGIVAKKVNEILQADAINGTDNEVVTVTDENEGEISEKVKLGTKALAGQWLAYGVTRSVTKRSVMTLAYGSKEFGFRQQVLRHTIQPAIDSGKGLMFTQPNQAAGYMAKLIWESVSVTVVAAVEAMNWLKSAAKLLAAEVSDKKTGEILRKRCAVHWVTPDGFPVWQEYKKPIQTRLNLMFLGQFRLQPTINTNKDSEIDAHKQESGIAPNFVHSQDGSHLRKTVVWAHEKYGIESFALIHDSFGTIPADAANLFKAVRETMVDTYESCDVLADFYDQFADQLHESQLDKMPALPAKGNLNLRDILESDFAFA

SEQ ID NO: 455 - DNA, 2670 bp, synthetic construct
  misc_feature 1..2670: note = Variant of RNA polymerase
  source 1..2670: mol_type = other DNA
atgcaccatcaccatcaccatatgaacacgattaacatcgctaagaacgacttctctgacatcgaactggctgctatcccgttcaacactctggctgaccattacggtgagcgtttagctcgcgaacagttggcccttgagcatgagtcttacgagatgggtgaagcacgtttccgcaagatgtttgagcgtcaacttaaagctggtgaggttgcggataacgctgccgccaagcctctcatcactaccctactccctaagatgattgcacgcatcaacgactggtttgaggaagtgaaagctaagcgcggcaagcgcccgacagccttccagttcctgcaagaaatcaagccggaagccgtagcgtacatcaccattaagaccactctggcttgcctaaccagtgcggaccgtacaaccgttcaggctgtagcaagcgcaatcggtcgggccattgaggacgaggctcgcttcggtcgtatccgtgaccttgaagctaagcacttcaagaaaaactatgaggaacaactcaacaagcgcgtagggcacgtctacaagaaagcatttatgcaagttgtcgaggctgacatgctctctaagggtctactcggtggcgaggcgtggtcttcgtggcataaggaagactctattcatgtaggagtacgctgcatcgagatgctcattgagtcaaccggaatggttagcttacaccgccaaaatgctggcgtagtaggtgttgactctgagactatcgaactcgcacctgaatacgctgaggctatcgcaacccgtgcaggtgcgctggctggcatctctccgatgttccaaccttgcgtagttcctcctaagccgtggactggcattactggtggtggctattgggctaacggtcgtcgtcctctggcgctggtgcgtactcacagtaagaaaggtctgatgcgctacgaagacgtttacatgcctgaggtgtacaaagcgattaacattgcgcaaaacaccgcctggtcgatcaacaagtgggtcctggcggtcgccaacgtaatcaccaagtggaagcattgtccggtcgaggacatccctgcgattgagcgtgaagaactcccgatgaaaccggaagacatcgacatgaatcctgaggctctcaccgcgtggaaacgtgctaaagctgctgtgtaccgcaaggacaaggctcgcaagtctcgccgtatcttgcttgagttcatgcttgagcaagccaataagtttgctaaccataaggccatctggttcccttacaacatggactggcgcggtcgtgtttacgctgtgtcaatgttcaacccgcaaggtaacgatatgaccaaaggactgcttacgctggcgaaaggtaaaccaatcggtaaggaaggttactactggctgaaaatccacggtgcaaactgtgcgggtgtcgataaggttccgttccctgagcgcatcaagttcattgaggaaaaccacgagaacatcatggcttgcgctaagtctccactggagaacacttggtgggctgagcaagatagtccgttctgcttccttgcgttctgctttgagtacgctggggtacagcaccacggcctgagctataactgctcccttccgctggcgtttgacgggtcttgctctggcatccagcacttctccgcgatgctccgagatgaggtaggtggtcgcgcggttaacttgcttcctagtgaaaccgttcaggacatctacgggattgttgctaagaaagtcaacgagattctacaagcagacgcaatcaatgggaccgataacgaagtagttaccgtgaccgatgagaacactggtgaaatctctgagaaagtcaagctgggcactaaggcactggctggtcaatggctggcttacggtgttactcgcagtgtgactaagcgttcagtcatgacgctggcttacgggtccaaagagttcggcttccgtcaacaagtgctgcgccacactattcagccagctattgattccggcaagggtctgatgttcactcagccgaatcaggctgctggatacatggctaagctgatttgggaatctgtgagcgtgacggtggtagctgcggttgaagcaatgaactggcttaagtctgctgctaagctgctggctgctgaggtcaaagataagagcactggagagattcttcgcaagcgttgcgctgtgcattgggtaactcctgatggtttccctgtgtggcaggaatacaagaagcctattcagacgcgcttgaacctgatgttcctcggtcagttccgcttacagcctaccattaacaccaacaaagatagcgagattgatgcacacaaacaggagtctggtatcgctcctaactttgtacacagccaagacggtagccaccttcgtaagactgtagtgtgggcacacgagaagtacggaatcgaatcttttgcactgattcacgactccttcggtaccattccggctgacgctgcgaacctgttcaaagcagtgcgcgaaactatggttgacacatatgagtcttgtgatgtactggctgatttctacgaccagttcgctgaccagttgcacgagtctcaattggacaaaatgccagcacttccggctaaaggtaacttgaacctccgtgacatcttagagtcggacttcgcgttcgcg

SEQ ID NO: 456 - protein, 890 aa, synthetic construct
  REGION 1..890: note = Variant of RNA polymerase
MHHHHHHMNTINIAKNDFSDIELAAIPFNTLADHYGERLAREQLALEHESYEMGEARFRKMFERQLKAGEVADNAAAKPLITTLLPKMIARINDWFEEVKAKRGKRPTAFQFLQEIKPEAVAYITIKTTLACLTSADRTTVQAVASAIGRAIEDEARFGRIRDLEAKHFKKNYEEQLNKRVGHVYKKAFMQVVEADMLSKGLLGGEAWSSWHKEDSIHVGVRCIEMLIESTGMVSLHRQNAGVVGVDSETIELAPEYAEAIATRAGALAGISPMFQPCVVPPKPWTGITGGGYWANGRRPLALVRTHSKKGLMRYEDVYMPEVYKAINIAQNTAWSINKWVLAVANVITKWKHCPVEDIPAIEREELPMKPEDIDMNPEALTAWKRAKAAVYRKDKARKSRRILLEFMLEQANKFANHKAIWFPYNMDWRGRVYAVSMFNPQGNDMTKGLLTLAKGKPIGKEGYYWLKIHGANCAGVDKVPFPERIKFIEENHENIMACAKSPLENTWWAEQDSPFCFLAFCFEYAGVQHHGLSYNCSLPLAFDGSCSGIQHFSAMLRDEVGGRAVNLLPSETVQDIYGIVAKKVNEILQADAINGTDNEVVTVTDENTGEISEKVKLGTKALAGQWLAYGVTRSVTKRSVMTLAYGSKEFGFRQQVLRHTIQPAIDSGKGLMFTQPNQAAGYMAKLIWESVSVTVVAAVEAMNWLKSAAKLLAAEVKDKSTGEILRKRCAVHWVTPDGFPVWQEYKKPIQTRLNLMFLGQFRLQPTINTNKDSEIDAHKQESGIAPNFVHSQDGSHLRKTVVWAHEKYGIESFALIHDSFGTIPADAANLFKAVRETMVDTYESCDVLADFYDQFADQLHESQLDKMPALPAKGNLNLRDILESDFAFA

SEQ ID NO: 457 - DNA, 2670 bp, synthetic construct
  misc_feature 1..2670: note = Variant of RNA polymerase
  source 1..2670: mol_type = other DNA
atgcaccatcaccatcaccatatgaacacgattaacatcgctaagaacgacttctctgacatcgaactggctgctatcccgttcaacactctggctgaccattacggtgagggtttagctcgcgaacagttggcccttgagcatgagtcttacgagatgggtgaagcacgtttccgcaagatgtttgagcgtcaacttaaagctggtgaggttgcggataacgctgccgccaagcctctcatcactaccctactccctaagatgattgcacgcatcaacgactggtttgaggaagtgaaagctaagcgcggcaagcgcccgacagccttccagttcctgcaagaaatcaagccggaagccgtagcgtacatcaccattaagaccactctggcttgcctaaccagtgcggaccgtacaaccgttcaggctgtagcaagcgcaatcggtcgggccattgaggacgaggctcgcttcggtcgtatccgtgaccttgaagctaagcacttcaagaaaaactacgaggaacaactcaacaagcgcgtagggcacgtctacaagaaagcatttatgcaagttgtcgaggctgacatgctctctaagggtctactcggtggcgaggcgtggtcttcgtggcataaggaagactctattcatgtaggagtacgctgcatcgagatgctcattgagtcaaccggaatggttagcttacaccgccaaaatgctggcgtagtaggtcaagactctgagactatcgaactcgcacctgaatacgctgaggctatcgcaacccgtgcaggtgcgctggctggcatctctccgatgttccaaccttgcgtagttcctcctaagccgtggactggcattactggtggtggctattgggctaacggtcgtcgtcctctggcgctggtgcgtactcacagtaagaaaggtctgatgcgctacgaagacgtttacatgcctgaggtgtacaaagcgattaacattgcgcaaaacaccgcctggtcgatcaacaagtgggtcctggcggtcgccaacgtaatcaccaagtggaagcattgtccggtcgaggacatccctgcgattgagcgtgaagaactcccgatgaaaccggaagacatcgacatgaatcctgaggctctcaccgcgtggaaacgtgctaaagctgctgtgtaccgcaaggacaaggctcgcaagtctcgccgtatcttgcttgagttcatgcttgagcaagccaataagtttgctaaccataaggccatctggttcccttacaacatggactggcgcggtcgtgtttacgctgtgtcaatgttcaacccgcaaggtaacgatatgaccaaaggactgcttacgctggcgaaaggtaaaccaatcggtaaggaaggttactactggctgaaaatccacggtgcaaactgtgcgggtgtcgataaggttccgttccctgagcgcatcaagttcattgaggaaaaccacgagaacatcatggcttgcgctaagtctccactggagaacacttggtgggctgagcaagatagtccgttctgcttccttgcgttctgctttgagtacgctggggtacagcaccacggcctgagctataactgctcccttccgctggcgtttgacgggtcttgctctggcatccagcacttctccgcgatgctccgagatgaggtaggtggtcgcgcggttaacttgcttcctagtgaaaccgttcaggacatctacgggattgttgctaagaaagtcaacgagattctacaagcagacgcaatcaatgggaccgataacgaagtagttaccgtgaccgatgagaacacgggtgaaatctctgagaaagtcaagctgggcactaaggcactggctggtcaatggctggcttacggtgttactcgcagtgtgactaagcgttcagtcatgacgctggcttacgggtccaaagagttcggcttccgtcaacaagtgctgcgccacactattcagccagctattgattccggcaagggtctgatgttcactcagccgaatcaggctgctggatacatggctaagctgatttgggaatctgtgagcgtgacggtggtagctgcggttgaagcaatgaactggcttaagtctgctgctaagctgctggctgctgaggtcagtgatgccaaaactggagagattcttcgcaagcgttgcgctgtgcattgggtaactcctgatggtttccctgtgtggcaggaatacaagaagcctattcagacgcgcttgaacctgatgttcctcggtcagttccgcttacagcctaccattaacaccaacaaagatagcgagattgatgcacacaaacaggagtctggtatcgctcctaactttgtacacagccaagacggtagccaccttcgtaagactgtagtgtgggcacacgagaagtacggaatcgaatcttttgcactgattcacgactccttcggtaccattccggctgacgctgcgaacctgttcaaagcagtgcgcgaaactatggttgacacatatgagtcttgtgatgtactggctgatttctacgaccagttcgctgaccagttgcacgagtctcaattggacaaaatgccagcacttccggctaaaggtaacttgaacctccgtgacatcttagagtcggacttcgcgttcgcg

SEQ ID NO: 458 - protein, 890 aa, synthetic construct
  REGION 1..890: note = Variant of RNA polymerase
MHHHHHHMNTINIAKNDFSDIELAAIPFNTLADHYGEGLAREQLALEHESYEMGEARFRKMFERQLKAGEVADNAAAKPLITTLLPKMIARINDWFEEVKAKRGKRPTAFQFLQEIKPEAVAYITIKTTLACLTSADRTTVQAVASAIGRAIEDEARFGRIRDLEAKHFKKNYEEQLNKRVGHVYKKAFMQVVEADMLSKGLLGGEAWSSWHKEDSIHVGVRCIEMLIESTGMVSLHRQNAGVVGQDSETIELAPEYAEAIATRAGALAGISPMFQPCVVPPKPWTGITGGGYWANGRRPLALVRTHSKKGLMRYEDVYMPEVYKAINIAQNTAWSINKWVLAVANVITKWKHCPVEDIPAIEREELPMKPEDIDMNPEALTAWKRAKAAVYRKDKARKSRRILLEFMLEQANKFANHKAIWFPYNMDWRGRVYAVSMFNPQGNDMTKGLLTLAKGKPIGKEGYYWLKIHGANCAGVDKVPFPERIKFIEENHENIMACAKSPLENTWWAEQDSPFCFLAFCFEYAGVQHHGLSYNCSLPLAFDGSCSGIQHFSAMLRDEVGGRAVNLLPSETVQDIYGIVAKKVNEILQADAINGTDNEVVTVTDENTGEISEKVKLGTKALAGQWLAYGVTRSVTKRSVMTLAYGSKEFGFRQQVLRHTIQPAIDSGKGLMFTQPNQAAGYMAKLIWESVSVTVVAAVEAMNWLKSAAKLLAAEVSDAKTGEILRKRCAVHWVTPDGFPVWQEYKKPIQTRLNLMFLGQFRLQPTINTNKDSEIDAHKQESGIAPNFVHSQDGSHLRKTVVWAHEKYGIESFALIHDSFGTIPADAANLFKAVRETMVDTYESCDVLADFYDQFADQLHESQLDKMPALPAKGNLNLRDILESDFAFA

SEQ ID NO: 459 - DNA, 2670 bp, synthetic construct
  misc_feature 1..2670: note = Variant of RNA polymerase
  source 1..2670: mol_type = other DNA
atgcaccatcaccatcaccatatgaacacgattaacatcgctaagaacgacttctctgacatcgaactggctgctatcccgttcaacactctggctgaccattacggtgagggtttagctcgcgaacagttggcccttgagcatgagtcttacgagatgggtgaagcacgtttccgcaagatgtttgagcgtcaacttaaagctggtgaggttgcggataacgctgccgccaagcctctcatcactaccctactccctaagatgattgcacgcatcaacgactggtttgaggaagtgaaagctaagcgcggcaagcgcccgacagccttccagttcctgcaagaaatcaagccggaagccgtagcgtacatcaccattaagaccactctggcttgcctaaccagtgcggaccgtacaaccgttcaggctgtagcaagcgcaatcggtcgggccattgaggacgaggctcgcttcggtcgtatccgtgaccttgaagctaagcacttcaagaaaaactatgaggaacaactcaacaagcgcgtagggcacgtctacaagaaagcatttatgcaagttgtcgaggctgacatgctctctaagggtctactcggtggcgaggcgtggtcttcgtggcataaggaagactctattcatgtaggagtacgctgcatcgagatgctcattgagtcaaccggaatggttagcttacaccgccaaaatgctggcgtagtaggtcaagactctgagactatcgaactcgcacctgaatacgctgaggctatcgcaacccgtgcaggtgcgctggctggcatctctccgatgttccaaccttgcgtagttcctcctaagccgtggactggcattactggtggtggctattgggctaacggtcgtcgtcctctggcgctggtgcgtactcacagtaagaaaggtctgatgcgctacgaagacgtttacatgcctgaggtgtacaaagcgattaacattgcgcaaaacaccgcctggtcgatcaacaagtgggtcctggcggtcgccaacgtaatcaccaagtggaagcattgtccggtcgaggacatccctgcgattgagcgtgaagaactcccgatgaaaccggaagacatcgacatgaatcctgaggctctcaccgcgtggaaacgtgctaaagctgctgtgtaccgcaaggacaaggctcgcaagtctcgccgtatcttgcttgagttcatgcttgagcaagccaataagtttgctaaccataaggccatctggttcccttacaacatggactggcgcggtcgtgtttacgctgtgtcaatgttcaacccgcaaggtaacgatatgaccaaaggactgcttacgctggcgaaaggtaaaccaatcggtaaggaaggttactactggctgaaaatccacggtgcaaactgtgcgggtgtcgataaggttccgttccctgagcgcatcaagttcattgaggaaaaccacgagaacatcatggcttgcgctaagtctccactggagaacacttggtgggctgagcaagatagtccgttctgcttccttgcgttctgctttgagtacgctggggtacagcaccacggcctgagctataactgctcccttccgctggcgtttgacgggtcttgctctggcatccagcacttctccgcgatgctccgagatgaggtaggtggtcgcgcggttaacttgcttcctagtgaaaccgttcaggacatctacgggattgttgctaagaaagtcaacgagattctacaagcagacgcaatcaatgggaccgataacgaagtagttaccgtgaccgatgagaacgaaggtgaaatctctgagaaagtcaagctgggcactaaggcactggctggtcaatggctggcttacggtgttactcgcagtgtgactaagcgttcagtcatgacgctggcttacgggtccaaagagttcggcttccgtcaacaagtgctgcgccacactattcagccagctattgattccggcaagggtctgatgttcactcagccgaatcaggctgctggatacatggctaagctgatttgggaatctgtgagcgtgacggtggtagctgcggttgaagcaatgaactggcttaagtctgctgctaagctgctggctgctgaggtcagtgatgccaaaactggagagattcttcgcaagcgttgcgctgtgcattgggtaactcctgatggtttccctgtgtggcaggaatacaagaagcctattcagacgcgcttgaacctgatgttcctcggtcagttccgcttacagcctaccattaacaccaacaaagatagcgagattgatgcacacaaacaggagtctggtatcgctcctaactttgtacacagccaagacggtagccaccttcgtaagactgtagtgtgggcacacgagaagtacggaatcgaatcttttgcactgattcacgactccttcggtaccattccggctgacgctgcgaacctgttcaaagcagtgcgcgaaactatggttgacacatatgagtcttgtgatgtactggctgatttctacgaccagttcgctgaccagttgcacgagtctcaattggacaaaatgccagcacttccggctaaaggtaacttgaacctccgtgacatcttagagtcggacttcgcgttcgcg

SEQ ID NO: 460 - protein, 890 aa, synthetic construct
  REGION 1..890: note = Variant of RNA polymerase
MHHHHHHMNTINIAKNDFSDIELAAIPFNTLADHYGEGLAREQLALEHESYEMGEARFRKMFERQLKAGEVADNAAAKPLITTLLPKMIARINDWFEEVKAKRGKRPTAFQFLQEIKPEAVAYITIKTTLACLTSADRTTVQAVASAIGRAIEDEARFGRIRDLEAKHFKKNYEEQLNKRVGHVYKKAFMQVVEADMLSKGLLGGEAWSSWHKEDSIHVGVRCIEMLIESTGMVSLHRQNAGVVGQDSETIELAPEYAEAIATRAGALAGISPMFQPCVVPPKPWTGITGGGYWANGRRPLALVRTHSKKGLMRYEDVYMPEVYKAINIAQNTAWSINKWVLAVANVITKWKHCPVEDIPAIEREELPMKPEDIDMNPEALTAWKRAKAAVYRKDKARKSRRILLEFMLEQANKFANHKAIWFPYNMDWRGRVYAVSMFNPQGNDMTKGLLTLAKGKPIGKEGYYWLKIHGANCAGVDKVPFPERIKFIEENHENIMACAKSPLENTWWAEQDSPFCFLAFCFEYAGVQHHGLSYNCSLPLAFDGSCSGIQHFSAMLRDEVGGRAVNLLPSETVQDIYGIVAKKVNEILQADAINGTDNEVVTVTDENEGEISEKVKLGTKALAGQWLAYGVTRSVTKRSVMTLAYGSKEFGFRQQVLRHTIQPAIDSGKGLMFTQPNQAAGYMAKLIWESVSVTVVAAVEAMNWLKSAAKLLAAEVSDAKTGEILRKRCAVHWVTPDGFPVWQEYKKPIQTRLNLMFLGQFRLQPTINTNKDSEIDAHKQESGIAPNFVHSQDGSHLRKTVVWAHEKYGIESFALIHDSFGTIPADAANLFKAVRETMVDTYESCDVLADFYDQFADQLHESQLDKMPALPAKGNLNLRDILESDFAFA

SEQ ID NO: 461 - DNA, 2670 bp, synthetic construct
  misc_feature 1..2670: note = Variant of RNA polymerase
  source 1..2670: mol_type = other DNA
atgcaccatcaccatcaccatatgaacacgattaacatcgctaagaacgacttctctgacatcgaactggctgctatcccgttcaacactctggctgaccattacggtgagggcttagctcgcgaacagttggcccttgagcatgagtcttacgagatgggtgaagcacgtttccgcaagatgtttgagcgtcaacttaaagctggtgaggttgcggataacgctgccgccaagcctctcatcactaccctactccctaagatgattgcacgcatcaacgactggtttgaggaagtgaaagctaagcgcggcaagcgcccgacagccttccagttcctgcaagaaatcaagccggaagccgtagcgtacatcaccattaagaccactctggcttgcctaaccagtgcggaccgtacaaccgttcagaacgtagcaagcgcaatcggtcgggccattgaggacgaggctcgcttcggtcgtatccgtgaccttgaagctaagcacttcaagaaaaactatgaggaacaactcaacaagcgcgtagggcacgtctacaagaaagcatttatgcaagttgtcgaggctgacatgctctctaagggtctactcggtggcgaggcgtggtcttcgtggcataaggaagactctattcatgtaggagtacgctgcatcgagatgctcattgagtcaaccggaatggttagcttacaccgccaaaatgctggcgtagtaggtcaagactctgagactatcgaactcgcacctgaatacgctgaggctatcgcaacccgtgcaggtgcgctggctggcatctctccgatgttccaaccttgcgtagttcctcctaagccgtggactggcattactggtggtggctattgggctaacggtcgtcgtcctctggcgctggtgcgtactcacagtaagaaaggtctgatgcgctacgaagacgtttacatgcctgaggtgtacaaagcgattaacattgcgcaaaacaccgcctggtcgatcaacaagtgggtcctggcggtcgccaacgtaatcaccaagtggaagcattgtccggtccgggacatccctgcgattgagcgtgaagaactcccgatgaaaccggaagacatcgacatgaatcctgaggctctcaccgcgtggaaacgtgctaaagctgctgtgtaccgcagagacaaggctcgcaagtctcgtcgtatcctgcttgagttcatgcttgagcaagccaataagtttgctaaccataaggccatctggttcccttacaacatggactggcgcggtcgtgtttacgctgtgtcaatgttcaacccgcaaggtaacgatatgaccaaaggactgcttacgctggcgaaaggtaaaccaatcggtaaggaaggttactactggctgaaaatccacggtgcaaactgtgcgggtgtcgataaggttccgttccctgagcgcatcaagttcattgaggaaaaccacgagaacatcatggcttgcgctaagtctccactggagaacacttggtgggctgagcaagatagtccgttctgcttccttgcgttctgctttgagtacgctggggtacagcaccacggcctgagctataactgctcccttccgctggcgtttgacgggtcttgctctggcatccagcacttctccgcgatgctccgagatgaggtaggtggtcgcgcggttaacttgcttcctagtgaaaccgttcaggacatctacgggattgttgctaagaaagtcaacgagattctacaagcagacgcaatcaatgggaccgataacgaagtagttaccgtgaccgatgagaacactggtgaaatctctgagaaagtcaagctgggcactaaggcactggctggtcaatggctggcttacggtgttactcgcagtgtgactaagcgttcagtcatgacgctggcttacgggtccaaagagttcggcttccgtcaacaagtgctgcgccacactattcagtgggctattgattccggcaagggtctgatgttcactcagccgaatcaggctgctggatacatggctaagctgatttgggaatctgtgagcgtgacggtggtagctgcggttgaagcaatgaactggcttaagtctgctgctaagctgctggctgctgaggtcaaagataagaagactggagagattcttcgcaagcgttgcgctgtgcattgggtaactcctgatggtttccctgtgtggcaggaatacaagaagcctattcagacgcgcttgaacctgatgttcctcggtcagttccgcttacagcctaccattaacaccaacaaagatagcgagattgatgcacataaacaggagtctggtatcgctcctaactttgtacacagccaagacggtagccaccttcgtaagactgtagtgtgggcacacgagaagtacggaatcgaatcttttgcactgattcacgactccttcggtaccattccggctgacgctgcgaacctgttcaaagcagtgcgcgaaactatggttgacacatatgagtcttgtgatgtactggctgatttctacgaccagttcgctgaccagttgcacgagtctcaattggacaaaatgccagcacttccggctaaaggtaacttgaacctccgtgacatcttagagtcggacttcgcgttcgcg

SEQ ID NO: 462 - protein, 890 aa, synthetic construct
  REGION 1..890: note = Variant of RNA polymerase
MHHHHHHMNTINIAKNDFSDIELAAIPFNTLADHYGEGLAREQLALEHESYEMGEARFRKMFERQLKAGEVADNAAAKPLITTLLPKMIARINDWFEEVKAKRGKRPTAFQFLQEIKPEAVAYITIKTTLACLTSADRTTVQNVASAIGRAIEDEARFGRIRDLEAKHFKKNYEEQLNKRVGHVYKKAFMQVVEADMLSKGLLGGEAWSSWHKEDSIHVGVRCIEMLIESTGMVSLHRQNAGVVGQDSETIELAPEYAEAIATRAGALAGISPMFQPCVVPPKPWTGITGGGYWANGRRPLALVRTHSKKGLMRYEDVYMPEVYKAINIAQNTAWSINKWVLAVANVITKWKHCPVRDIPAIEREELPMKPEDIDMNPEALTAWKRAKAAVYRRDKARKSRRILLEFMLEQANKFANHKAIWFPYNMDWRGRVYAVSMFNPQGNDMTKGLLTLAKGKPIGKEGYYWLKIHGANCAGVDKVPFPERIKFIEENHENIMACAKSPLENTWWAEQDSPFCFLAFCFEYAGVQHHGLSYNCSLPLAFDGSCSGIQHFSAMLRDEVGGRAVNLLPSETVQDIYGIVAKKVNEILQADAINGTDNEVVTVTDENTGEISEKVKLGTKALAGQWLAYGVTRSVTKRSVMTLAYGSKEFGFRQQVLRHTIQWAIDSGKGLMFTQPNQAAGYMAKLIWESVSVTVVAAVEAMNWLKSAAKLLAAEVKDKKTGEILRKRCAVHWVTPDGFPVWQEYKKPIQTRLNLMFLGQFRLQPTINTNKDSEIDAHKQESGIAPNFVHSQDGSHLRKTVVWAHEKYGIESFALIHDSFGTIPADAANLFKAVRETMVDTYESCDVLADFYDQFADQLHESQLDKMPALPAKGNLNLRDILESDFAFA

SEQ ID NO: 463 - DNA, 2670 bp, synthetic construct
  misc_feature 1..2670: note = Variant of RNA polymerase
  source 1..2670: mol_type = other DNA
atgcaccatcaccatcaccatatgaacacgattaacatcgctaagaacgacttctctgacatcgaactggctgctatcccgttcaacactctggctgaccattacggtgagggcttagctcgcgaacagttggcccttgagcatgagtcttacgagatgggtgaagcacgtttccgcaagatgtttgagcgtcaacttaaagctggtgaggttgcggataacgctgccgccaagcctctcatcactaccctactccctaagatgattgcacgcatcaacgactggtttgaggaagtgaaagctaagcgcggcaagcgcccgacagccttccagttcctgcaagaaatcaagccggaagccgtagcgtacatcaccattaagaccactctggcttgcctaaccagtgcggaccgtacaaccgttcagcaagtagcaagcgcaatcggtcgggccattgaggacgaggctcgcttcggtcgtatccgtgaccttgaagctaagcacttcaagaaaaactatgaggaacaactcaacaagcgcgtagggcacgtctacaagaaagcatttatgcaagttgtcgaggctgacatgctctctaagggtctactcggtggcgaggcgtggtcttcgtggcataaggaagactctattcatgtaggagtacgctgcatcgagatgctcattgagtcaaccggaatggttagcttacaccgccaaaatgctggcgtagtaggtcaagactctgagactatcgaactcgcacctgaatacgctgaggctatcgcaacccgtgcaggtgcgctggctggcatctctccgatgttccaaccttgcgtagttcctcctaagccgtggactggcattactggtggtggctattgggctaacggtcgtcgtcctctggcgctggtgcgtactcacagtaagaaaggtctgatgcgctacgaagacgtttacatgcctgaggtgtacaaagcgattaacattgcgcaaaacaccgcctggtcgatcaacaagtgggtcctggcggtcgccaacgtaatcaccaagtggaagcattgtccggtccgggacatccctgcgattgagcgtgaagaactcccgatgaaaccggaagacatcgacatgaatcctgaggctctcaccgcgtggaaacgtgctaaagctgctgtgtaccgcagagacaaggctcgcaagtctcgtcgtatcctgcttgagttcatgcttgagcaagccaataagtttgctaaccataaggccatctggttcccttacaacatggactggcgcggtcgtgtttacgctgtgtcaatgttcaacccgcaaggtaacgatatgaccaaaggactgcttacgctggcgaaaggtaaaccaatcggtaaggaaggttactactggctgaaaatccacggtgcaaactgtgcgggtgtcgataaggttccgttccctgagcgcatcaagttcattgaggaaaaccacgagaacatcatggcttgcgctaagtctccactggagaacacttggtgggctgagcaagatagtccgttctgcttccttgcgttctgctttgagtacgctggggtacagcaccacggcctgagctataactgctcccttccgctggcgtttgacgggtcttgctctggcatccagcacttctccgcgatgctccgagatgaggtaggtggtcgcgcggttaacttgcttcctagtgaaaccgttcaggacatctacgggattgttgctaagaaagtcaacgagattctacaagcagacgcaatcaatgggaccgataacgaagtagttaccgtgaccgatgagaacactggtgaaatctctgagaaagtcaagctgggcactaaggcactggctggtcaatggctggcttacggtgttactcgcagtgtgactaagcgttcagtcatgacgctggcttacgggtccaaagagttcggcttccgtcaacaagtgctgcgccacactattcagtgggctattgattccggcaagggtctgatgttcactcagccgaatcaggctgctggatacatggctaagctgatttgggaatctgtgagcgtgacggtggtagctgcggttgaagcaatgaactggcttaagtctgctgctaagctgctggctgctgaggtcaaagataagaagactggagagattcttcgcaagcgttgcgctgtgcattgggtaactcctgatggtttccctgtgtggcaggaatacaagaagcctattcagacgcgcttgaacctgatgttcctcggtcagttccgcttacagcctaccattaacaccaacaaagatagcgagattgatgcacataaacaggagtctggtatcgctcctaactttgtacacagccaagacggtagccaccttcgtaagactgtagtgtgggcacacgagaagtacggaatcgaatcttttgcactgattcacgactccttcggtaccattccggctgacgctgcgaacctgttcaaagcagtgcgcgaaactatggttgacacatatgagtcttgtgatgtactggctgatttctacgaccagttcgctgaccagttgcacgagtctcaattggacaaaatgccagcacttccggctaaaggtaacttgaacctccgtgacatcttagagtcggacttcgcgttcgcg

SEQ ID NO: 464 - protein, 890 aa, synthetic construct
  REGION 1..890: note = Variant of RNA polymerase
MHHHHHHMNTINIAKNDFSDIELAAIPFNTLADHYGEGLAREQLALEHESYEMGEARFRKMFERQLKAGEVADNAAAKPLITTLLPKMIARINDWFEEVKAKRGKRPTAFQFLQEIKPEAVAYITIKTTLACLTSADRTTVQQVASAIGRAIEDEARFGRIRDLEAKHFKKNYEEQLNKRVGHVYKKAFMQVVEADMLSKGLLGGEAWSSWHKEDSIHVGVRCIEMLIESTGMVSLHRQNAGVVGQDSETIELAPEYAEAIATRAGALAGISPMFQPCVVPPKPWTGITGGGYWANGRRPLALVRTHSKKGLMRYEDVYMPEVYKAINIAQNTAWSINKWVLAVANVITKWKHCPVRDIPAIEREELPMKPEDIDMNPEALTAWKRAKAAVYRRDKARKSRRILLEFMLEQANKFANHKAIWFPYNMDWRGRVYAVSMFNPQGNDMTKGLLTLAKGKPIGKEGYYWLKIHGANCAGVDKVPFPERIKFIEENHENIMACAKSPLENTWWAEQDSPFCFLAFCFEYAGVQHHGLSYNCSLPLAFDGSCSGIQHFSAMLRDEVGGRAVNLLPSETVQDIYGIVAKKVNEILQADAINGTDNEVVTVTDENTGEISEKVKLGTKALAGQWLAYGVTRSVTKRSVMTLAYGSKEFGFRQQVLRHTIQWAIDSGKGLMFTQPNQAAGYMAKLIWESVSVTVVAAVEAMNWLKSAAKLLAAEVKDKKTGEILRKRCAVHWVTPDGFPVWQEYKKPIQTRLNLMFLGQFRLQPTINTNKDSEIDAHKQESGIAPNFVHSQDGSHLRKTVVWAHEKYGIESFALIHDSFGTIPADAANLFKAVRETMVDTYESCDVLADFYDQFADQLHESQLDKMPALPAKGNLNLRDILESDFAFA

SEQ ID NO: 465 - DNA, 2670 bp, synthetic construct
  misc_feature 1..2670: note = Variant of RNA polymerase
  source 1..2670: mol_type = other DNA
atgcaccatcaccatcaccatatgaacacgattaacatcgctaagaacgacttctctgacatcgaactggctgctatcccgttcaacactctggctgaccattacggtgagggcttagctcgcgaacagttggcccttgagcatgagtcttacgagatgggtgaagcacgtttccgcaagatgtttgagcgtcaacttaaagctggtgaggttgcggataacgctgccgccaagcctctcatcactaccctactccctaagatgattgcacgcatcaacgactggtttgaggaagtgaaagctaagcgcggcaagcgcccgacagccttccagttcctgcaagaaatcaagccggaagccgtagcgtacatcaccattaagaccactctggcttgcctaaccagtgcggaccgtacaaccgttcagcgcgtagcaagcgcaatcggtcgggccattgaggacgaggctcgcttcggtcgtatccgtgaccttgaagctaagcacttcaagaaaaactatgaggaacaactcaacaagcgcgtagggcacgtctacaagaaagcatttatgcaagttgtcgaggctgacatgctctctaagggtctactcggtggcgaggcgtggtcttcgtggcataaggaagactctattcatgtaggagtacgctgcatcgagatgctcattgagtcaaccggaatggttagcttacaccgccaaaatgctggcgtagtaggtcaagactctgagactatcgaactcgcacctgaatacgctgaggctatcgcaacccgtgcaggtgcgctggctggcatctctccgatgttccaaccttgcgtagttcctcctaagccgtggactggcattactggtggtggctattgggctaacggtcgtcgtcctctggcgctggtgcgtactcacagtaagaaaggtctgatgcgctacgaagacgtttacatgcctgaggtgtacaaagcgattaacattgcgcaaaacaccgcctggtcgatcaacaagtgggtcctggcggtcgccaacgtaatcaccaagtggaagcattgtccggtccgggacatccctgcgattgagcgtgaagaactcccgatgaaaccggaagacatcgacatgaatcctgaggctctcaccgcgtggaaacgtgctaaagctgctgtgtaccgcagagacaaggctcgcaagtctcgtcgtatcctgcttgagttcatgcttgagcaagccaataagtttgctaaccataaggccatctggttcccttacaacatggactggcgcggtcgtgtttacgctgtgtcaatgttcaacccgcaaggtaacgatatgaccaaaggactgcttacgctggcgaaaggtaaaccaatcggtaaggaaggttactactggctgaaaatccacggtgcaaactgtgcgggtgtcgataaggttccgttccctgagcgcatcaagttcattgaggaaaaccacgagaacatcatggcttgcgctaagtctccactggagaacacttggtgggctgagcaagatagtccgttctgcttccttgcgttctgctttgagtacgctggggtacagcaccacggcctgagctataactgctcccttccgctggcgtttgacgggtcttgctctggcatccagcacttctccgcgatgctccgagatgaggtaggtggtcgcgcggttaacttgcttcctagtgaaaccgttcaggacatctacgggattgttgctaagaaagtcaacgagattctacaagcagacgcaatcaatgggaccgataacgaagtagttaccgtgaccgatgagaacactggtgaaatctctgagaaagtcaagctgggcactaaggcactggctggtcaatggctggcttacggtgttactcgcagtgtgactaagcgttcagtcatgacgctggcttacgggtccaaagagttcggcttccgtcaacaagtgctgcgccacactattcagtgggctattgattccggcaagggtctgatgttcactcagccgaatcaggctgctggatacatggctaagctgatttgggaatctgtgagcgtgacggtggtagctgcggttgaagcaatgaactggcttaagtctgctgctaagctgctggctgctgaggtcaaagataagaagactggagagattcttcgcaagcgttgcgctgtgcattgggtaactcctgatggtttccctgtgtggcaggaatacaagaagcctattcagacgcgcttgaacctgatgttcctcggtcagttccgcttacagcctaccattaacaccaacaaagatagcgagattgatgcacataaacaggagtctggtatcgctcctaactttgtacacagccaagacggtagccaccttcgtaagactgtagtgtgggcacacgagaagtacggaatcgaatcttttgcactgattcacgactccttcggtaccattccggctgacgctgcgaacctgttcaaagcagtgcgcgaaactatggttgacacatatgagtcttgtgatgtactggctgatttctacgaccagttcgctgaccagttgcacgagtctcaattggacaaaatgccagcacttccggctaaaggtaacttgaacctccgtgacatcttagagtcggacttcgcgttcgcg

SEQ ID NO: 466 - protein, 890 aa, synthetic construct
  REGION 1..890: note = Variant of RNA polymerase
MHHHHHHMNTINIAKNDFSDIELAAIPFNTLADHYGEGLAREQLALEHESYEMGEARFRKMFERQLKAGEVADNAAAKPLITTLLPKMIARINDWFEEVKAKRGKRPTAFQFLQEIKPEAVAYITIKTTLACLTSADRTTVQRVASAIGRAIEDEARFGRIRDLEAKHFKKNYEEQLNKRVGHVYKKAFMQVVEADMLSKGLLGGEAWSSWHKEDSIHVGVRCIEMLIESTGMVSLHRQNAGVVGQDSETIELAPEYAEAIATRAGALAGISPMFQPCVVPPKPWTGITGGGYWANGRRPLALVRTHSKKGLMRYEDVYMPEVYKAINIAQNTAWSINKWVLAVANVITKWKHCPVRDIPAIEREELPMKPEDIDMNPEALTAWKRAKAAVYRRDKARKSRRILLEFMLEQANKFANHKAIWFPYNMDWRGRVYAVSMFNPQGNDMTKGLLTLAKGKPIGKEGYYWLKIHGANCAGVDKVPFPERIKFIEENHENIMACAKSPLENTWWAEQDSPFCFLAFCFEYAGVQHHGLSYNCSLPLAFDGSCSGIQHFSAMLRDEVGGRAVNLLPSETVQDIYGIVAKKVNEILQADAINGTDNEVVTVTDENTGEISEKVKLGTKALAGQWLAYGVTRSVTKRSVMTLAYGSKEFGFRQQVLRHTIQWAIDSGKGLMFTQPNQAAGYMAKLIWESVSVTVVAAVEAMNWLKSAAKLLAAEVKDKKTGEILRKRCAVHWVTPDGFPVWQEYKKPIQTRLNLMFLGQFRLQPTINTNKDSEIDAHKQESGIAPNFVHSQDGSHLRKTVVWAHEKYGIESFALIHDSFGTIPADAANLFKAVRETMVDTYESCDVLADFYDQFADQLHESQLDKMPALPAKGNLNLRDILESDFAFA

SEQ ID NO: 467 - DNA, 2670 bp, synthetic construct
  misc_feature 1..2670: note = Variant of RNA polymerase
  source 1..2670: mol_type = other DNA
atgcaccatcaccatcaccatatgaacacgattaacatcgctaagaacgacttctctgacatcgaactggctgctatcccgttcaacactctggctgaccattacggtgagggcttagctcgcgaacagttggcccttgagcatgagtcttacgagatgggtgaagcacgtttccgcaagatgtttgagcgtcaacttaaagctggtgaggttgcggataacgctgccgccaagcctctcatcactaccctactccctaagatgattgcacgcatcaacgactggtttgaggaagtgaaagctaagcgcggccgtcgcccgacagccttccagttcctgcaagaaatcaagccggaagccgtagcgtacatcaccattaagaccactctggcttgcctaaccagtgcggaccgtacaaccgttcaggctgtagcaagcgcaatcggtcgggccattgaggacgaggctcgcttcggtcgtatccgtgaccttgaagctaagcacttcaagaaaaactatgaggaacaactcaacaagcgcgtagggcacgtctacaagaaagcatttatgcaagttgtcgaggctgacatgctctctaagggtctactcggtggcgaggcgtggtcttcgtggcataaggaagactctattcatgtaggagtacgctgcatcgagatgctcattgagtcaaccggaatggttagcttacaccgccaaaatgctggcgtagtaggtcaagactctgagactatcgaactcgcacctgaatacgctgaggctatcgcaacccgtgcaggtgcgctggctggcatctctccgatgttccaaccttgcgtagttcctcctaagccgtggactggcattactggtggtggctattgggctaacggtcgtcgtcctctggcgctggtgcgtactcacagtaagaaaggtctgatgcgctacgaagacgtttacatgcctgaggtgtacaaagcgattaacattgcgcaaaacaccgcctggtcgatcaacaagtgggtcctggcggtcgccaacgtaatcaccaagtggaagcattgtccggtccgggacatccctgcgattgagcgtgaagaactcccgatgaaaccggaagacatcgacatgaatcctgaggctctcaccgcgtggaaacgtgctaaagctgctgtgtaccgcagagacaaggctcgcaagtctcgtcgtatcctgcttgagttcatgcttgagcaagccaataagtttgctaaccataaggccatctggttcccttacaacatggactggcgcggtcgtgtttacgctgtgtcaatgttcaacccgcaaggtaacgatatgaccaaaggactgcttacgctggcgaaaggtaaaccaatcggtaaggaaggttactactggctgaaaatccacggtgcaaactgtgcgggtgtcgataaggttccgttccctgagcgcatcaagttcattgaggaaaaccacgagaacatcatggcttgcgctaagtctccactggagaacacttggtgggctgagcaagatagtccgttctgcttccttgcgttctgctttgagtacgctggggtacagcaccacggcctgagctataactgctcccttccgctggcgtttgacgggtcttgctctggcatccagcacttctccgcgatgctccgagatgaggtaggtggtcgcgcggttaacttgcttcctagtgaaaccgttcaggacatctacgggattgttgctaagaaagtcaacgagattctacaagcagacgcaatcaatgggaccgataacgaagtagttaccgtgaccgatgagaacactggtgaaatctctgagaaagtcaagctgggcactaaggcactggctggtcaatggctggcttacggtgttactcgcagtgtgactaagcgttcagtcatgacgctggcttacgggtccaaagagttcggcttccgtcaacaagtgctgcgccacactattcagtgggctattgattccggcaagggtctgatgttcactcagccgaatcaggctgctggatacatggctaagctgatttgggaatctgtgagcgtgacggtggtagctgcggttgaagcaatgaactggcttaagtctgctgctaagctgctggctgctgaggtcaaagataagaagactggagagattcttcgcaagcgttgcgctgtgcattgggtaactcctgatggtttccctgtgtggcaggaatacaagaagcctattcagacgcgcttgaacctgatgttcctcggtcagttccgcttacagcctaccattaacaccaacaaagatagcgagattgatgcacataaacaggagtctggtatcgctcctaactttgtacacagccaagacggtagccaccttcgtaagactgtagtgtgggcacacgagaagtacggaatcgaatcttttgcactgattcacgactccttcggtaccattccggctgacgctgcgaacctgttcaaagcagtgcgcgaaactatggttgacacatatgagtcttgtgatgtactggctgatttctacgaccagttcgctgaccagttgcacgagtctcaattggacaaaatgccagcacttccggctaaaggtaacttgaacctccgtgacatcttagagtcggacttcgcgttcgcg

SEQ ID NO: 468 - protein, 890 aa, synthetic construct
  REGION 1..890: note = Variant of RNA polymerase
MHHHHHHMNTINIAKNDFSDIELAAIPFNTLADHYGEGLAREQLALEHESYEMGEARFRKMFERQLKAGEVADNAAAKPLITTLLPKMIARINDWFEEVKAKRGRRPTAFQFLQEIKPEAVAYITIKTTLACLTSADRTTVQAVASAIGRAIEDEARFGRIRDLEAKHFKKNYEEQLNKRVGHVYKKAFMQVVEADMLSKGLLGGEAWSSWHKEDSIHVGVRCIEMLIESTGMVSLHRQNAGVVGQDSETIELAPEYAEAIATRAGALAGISPMFQPCVVPPKPWTGITGGGYWANGRRPLALVRTHSKKGLMRYEDVYMPEVYKAINIAQNTAWSINKWVLAVANVITKWKHCPVRDIPAIEREELPMKPEDIDMNPEALTAWKRAKAAVYRRDKARKSRRILLEFMLEQANKFANHKAIWFPYNMDWRGRVYAVSMFNPQGNDMTKGLLTLAKGKPIGKEGYYWLKIHGANCAGVDKVPFPERIKFIEENHENIMACAKSPLENTWWAEQDSPFCFLAFCFEYAGVQHHGLSYNCSLPLAFDGSCSGIQHFSAMLRDEVGGRAVNLLPSETVQDIYGIVAKKVNEILQADAINGTDNEVVTVTDENTGEISEKVKLGTKALAGQWLAYGVTRSVTKRSVMTLAYGSKEFGFRQQVLRHTIQWAIDSGKGLMFTQPNQAAGYMAKLIWESVSVTVVAAVEAMNWLKSAAKLLAAEVKDKKTGEILRKRCAVHWVTPDGFPVWQEYKKPIQTRLNLMFLGQFRLQPTINTNKDSEIDAHKQESGIAPNFVHSQDGSHLRKTVVWAHEKYGIESFALIHDSFGTIPADAANLFKAVRETMVDTYESCDVLADFYDQFADQLHESQLDKMPALPAKGNLNLRDILESDFAFA

SEQ ID NO: 469 - DNA, 2670 bp, synthetic construct
  misc_feature 1..2670: note = Variant of RNA polymerase
  source 1..2670: mol_type = other DNA
atgcaccatcaccatcaccatatgaacacgattaacatcgctaagaacgacttctctgacatcgaactggctgctatcccgttcaacactctggctgaccattacggtgagggcttagctcgcgaacagttggcccttgagcatgagtcttacgagatgggtgaagcacgtttccgcaagatgtttgagcgtcaacttaaagctggtgaggttgcggataacgctgccgccaagcctctcatcactaccctactccctaagatgattgcacgcatcaacgactggtttgaggaagtgaaagctaagcgcggcaagcgcccgacagccttccagttcctgcaagaaatcaagccggaagccgtagcgtacatcaccattaagaccactctggcttgcctaaccagtgcggaccgtacaaccgttcaggctgtagcaagcgcaatcggtcgggccattgaggacgaggctcgcttcggtcgtatccgtgaccttgaagctaagcacttcaagaaaaactatgaggaacaactcaacaagcgcgtagggcacgtctacaagaaagcatttatgcaagttgtcgaggctgacatgctctctaagggtctactcggtggcgaggcgtggtcttcgtggcataaggaagactctattcatgtaggagtacgctgcatcgagatgctcattgagtcaaccggaatggttagcttacaccgccaaaatgctggcgtagtaggtcaagactctgagactatcgaactcgcacctgaatacgctgaggctatcgcaacccgtgcaggtgcgctggctggcatctctccgatgttccaaccttgcgtagttcctcctaagccgtggactggcattactggtggtggctattgggctaacggtcgtcgtcctctggcgctggtgcgtactcacagtaagaaaggtctgatgcgctacgaagacgtttacatgcctgaggtgtacaaagcgattaacattgcgcaaaacaccgcctggtcgatcaacaagtgggtcctggcggtcgccaacgtaatcaccaagtggaagcattgtccggtccgggacatccctgcgattgagcgtgaagaactcccgatgaaaccggaagacatcgacatgaatcctgaggctctcaccgcgtggaaacgtgctaaagctgctgtgtaccgcagagacaaggctcgcaagtctcgtcgtatcctgcttgagttcatgcttgagcaagccaataagtttgctaaccataaggccatctggttcccttacaacatggactggcgcggtcgtgtttacgctgtgtcaatgttcaacccgcaaggtaacgatatgaccaaaggactgcttacgctggcgaaaggtaaaccaatcggtaaggaaggttactactggctgaaaatccacggtgcaaactgtgcgggtgtcgataaggttccgttccctgagcgcatcaagttcattgaggaaaaccacgagaacatcatggcttgcgctaagtctccactggagaacacttggtgggctgagcaagatagtccgttctgcttccttgcgttctgctttgagtacgctggggtacagcaccacggcctgagctataactgctcccttccgctggcgtttgacgggtcttgctctggcatccagcacttctccgcgatgctccgagatgaggtaggtggtcgcgcggttaacttgcttcctagtgaaaccgttcaggacatctacgggattgttgctaagaaagtcaacgagattctacaagcagacgcaatcaatgggaccgataacgaagtagttaccgtgaccgatgagaacactggtgaaatctctgagaaagtcaagctgggcactaaggcactggctggtcaatggctggcttacggtgttactcgcagtgtgactaagcgttcagtcatgacgctggcttacgggtccaaagagttcggcttccgtcaacaagtgctgcgccacactattcagtgggctattgattccggcaagggtctgatgttcactcagccgaatcaggctgctggatacatggctaagctgatttgggaatctgtgagcgtgacggtggtagctgcggttgaagcaatgaactggcttaagtctgctgctaagctgctggctgctgaggtcaaagataagaagactggagagattcttcgcaagcgttgcgctgtgcattgggtaactcctgatggtttccctgtgtggcaggaatacaagaagcctattcagacgcgcttgaacctgatgttcctcggtcagttccgcttacagcctaccattaacaccaacaaagatagccgcattgatgcacgtaaacaggagtctggtatcgctcctaactttgtacacagccaagacggtagccaccttcgtaagactgtagtgtgggcacacgagaagtacggaatcgaatcttttgcactgattcacgactccttcggtaccattccggctgacgctgcgaacctgttcaaagcagtgcgcgaaactatggttgacacatatgagtcttgtgatgtactggctgatttctacgaccagttcgctgaccagttgcacgagtctcaattggacaaaatgccagcacttccggctaaaggtaacttgaacctccgtgacatcttagagtcggacttcgcgttcgcg

SEQ ID NO: 470 - protein, 890 aa, synthetic construct
  REGION 1..890: note = Variant of RNA polymerase
MHHHHHHMNTINIAKNDFSDIELAAIPFNTLADHYGEGLAREQLALEHESYEMGEARFRKMFERQLKAGEVADNAAAKPLITTLLPKMIARINDWFEEVKAKRGKRPTAFQFLQEIKPEAVAYITIKTTLACLTSADRTTVQAVASAIGRAIEDEARFGRIRDLEAKHFKKNYEEQLNKRVGHVYKKAFMQVVEADMLSKGLLGGEAWSSWHKEDSIHVGVRCIEMLIESTGMVSLHRQNAGVVGQDSETIELAPEYAEAIATRAGALAGISPMFQPCVVPPKPWTGITGGGYWANGRRPLALVRTHSKKGLMRYEDVYMPEVYKAINIAQNTAWSINKWVLAVANVITKWKHCPVRDIPAIEREELPMKPEDIDMNPEALTAWKRAKAAVYRRDKARKSRRILLEFMLEQANKFANHKAIWFPYNMDWRGRVYAVSMFNPQGNDMTKGLLTLAKGKPIGKEGYYWLKIHGANCAGVDKVPFPERIKFIEENHENIMACAKSPLENTWWAEQDSPFCFLAFCFEYAGVQHHGLSYNCSLPLAFDGSCSGIQHFSAMLRDEVGGRAVNLLPSETVQDIYGIVAKKVNEILQADAINGTDNEVVTVTDENTGEISEKVKLGTKALAGQWLAYGVTRSVTKRSVMTLAYGSKEFGFRQQVLRHTIQWAIDSGKGLMFTQPNQAAGYMAKLIWESVSVTVVAAVEAMNWLKSAAKLLAAEVKDKKTGEILRKRCAVHWVTPDGFPVWQEYKKPIQTRLNLMFLGQFRLQPTINTNKDSRIDARKQESGIAPNFVHSQDGSHLRKTVVWAHEKYGIESFALIHDSFGTIPADAANLFKAVRETMVDTYESCDVLADFYDQFADQLHESQLDKMPALPAKGNLNLRDILESDFAFA

SEQ ID NO: 471 - DNA, 2670 bp, synthetic construct
  misc_feature 1..2670: note = Variant of RNA polymerase
  source 1..2670: mol_type = other DNA
atgcaccatcaccatcaccatatgaacacgattaacatcgctaagaacgacttctctgacatcgaactggctgctatcccgttcaacactctggctgaccattacggtgagggcttagctcgcgaacagttggcccttgagcatgagtcttacgagatgggtgaagcacgtttccgcaagatgtttgagcgtcaacttaaagctggtgaggttgcggataacgctgccgccaagcctctcatcactaccctactccctaagatgattgcacgcatcaacgactggtttgaggaagtgaaagctaagcgcggcaagcgcccgacagccttccagttcctgcaagaaatcaagccggaagccgtagcgtacatcaccattaagaccactctggcttgcctaaccaaagcggaccgtacaaccgttcaggctgtagcaagcgcaatcggtcgggccattgaggacgaggctcgcttcggtcgtatccgtgaccttgaagctaagcacttcaagaaaaactatgaggaacaactcaacaagcgcgtagggcacgtctacaagaaagcatttatgcaagttgtcgaggctgacatgctctctaagggtctactcggtggcgaggcgtggtcttcgtggcataaggaagactctattcatgtaggagtacgctgcatcgagatgctcattgagtcaaccggaatggttagcttacaccgccaaaatgctggcgtagtaggtcaagactctgagactatcgaactcgcacctgaatacgctgaggctatcgcaacccgtgcaggtgcgctggctggcatctctccgatgttccaaccttgcgtagttcctcctaagccgtggactggcattactggtggtggctattgggctaacggtcgtcgtcctctggcgctggtgcgtactcacagtaagaaaggtctgatgcgctacgaagacgtttacatgcctgaggtgtacaaagcgattaacattgcgcaaaacaccgcctggtcgatcaacaagtgggtcctggcggtcgccaacgtaatcaccaagtggaagcattgtccggtccgggacatccctgcgattgagcgtgaagaactcccgatgaaaccggaagacatcgacatgaatcctgaggctctcaccgcgtggaaacgtgctaaagctgctgtgtaccgcagagacaaggctcgcaagtctcgtcgtatcctgcttgagttcatgcttgagcaagccaataagtttgctaaccataaggccatctggttcccttacaacatggactggcgcggtcgtgtttacgctgtgtcaatgttcaacccgcaaggtaacgatatgaccaaaggactgcttacgctggcgaaaggtaaaccaatcggtaaggaaggttactactggctgaaaatccacggtgcaaactgtgcgggtgtcgataaggttccgttccctgagcgcatcaagttcattgaggaaaaccacgagaacatcatggcttgcgctaagtctccactggagaacacttggtgggctgagcaagatagtccgttctgcttccttgcgttctgctttgagtacgctggggtacagcaccacggcctgagctataactgctcccttccgctggcgtttgacgggtcttgctctggcatccagcacttctccgcgatgctccgagatgaggtaggtggtcgcgcggttaacttgcttcctagtgaaaccgttcaggacatctacgggattgttgctaagaaagtcaacgagattctacaagcagacgcaatcaatgggaccgataacgaagtagttaccgtgaccgatgagaacactggtgaaatctctgagaaagtcaagctgggcactaaggcactggctggtcaatggctggcttacggtgttactcgcagtgtgactaagcgttcagtcatgacgctggcttacgggtccaaagagttcggcttccgtcaacaagtgctgcgccacactattcagtgggctattgattccggcaagggtctgatgttcactcagccgaatcaggctgctggatacatggctaagctgatttgggaatctgtgagcgtgacggtggtagctgcggttgaagcaatgaactggcttaagtctgctgctaagctgctggctgctgaggtcaaagataagaagactggagagattcttcgcaagcgttgcgctgtgcattgggtaactcctgatggtttccctgtgtggcaggaatacaagaagcctattcagacgcgcttgaacctgatgttcctcggtcagttccgcttacagcctaccattaacaccaacaaagatagcgagattgatgcacataaacaggagtctggtatcgctcctaactttgtacacagccaagacggtagccaccttcgtaagactgtagtgtgggcacacgagaagtacggaatcgaatcttttgcactgattcacgactccttcggtaccattccggctgacgctgcgaacctgttcaaagcagtgcgcgaaactatggttgacacatatgagtcttgtgatgtactggctgatttctacgaccagttcgctgaccagttgcacgagtctcaattggacaaaatgccagcacttccggctaaaggtaacttgaacctccgtgacatcttagagtcggacttcgcgttcgcg

SEQ ID NO: 472 - protein, 890 aa, synthetic construct
  REGION 1..890: note = Variant of RNA polymerase
MHHHHHHMNTINIAKNDFSDIELAAIPFNTLADHYGEGLAREQLALEHESYEMGEARFRKMFERQLKAGEVADNAAAKPLITTLLPKMIARINDWFEEVKAKRGKRPTAFQFLQEIKPEAVAYITIKTTLACLTKADRTTVQAVASAIGRAIEDEARFGRIRDLEAKHFKKNYEEQLNKRVGHVYKKAFMQVVEADMLSKGLLGGEAWSSWHKEDSIHVGVRCIEMLIESTGMVSLHRQNAGVVGQDSETIELAPEYAEAIATRAGALAGISPMFQPCVVPPKPWTGITGGGYWANGRRPLALVRTHSKKGLMRYEDVYMPEVYKAINIAQNTAWSINKWVLAVANVITKWKHCPVRDIPAIEREELPMKPEDIDMNPEALTAWKRAKAAVYRRDKARKSRRILLEFMLEQANKFANHKAIWFPYNMDWRGRVYAVSMFNPQGNDMTKGLLTLAKGKPIGKEGYYWLKIHGANCAGVDKVPFPERIKFIEENHENIMACAKSPLENTWWAEQDSPFCFLAFCFEYAGVQHHGLSYNCSLPLAFDGSCSGIQHFSAMLRDEVGGRAVNLLPSETVQDIYGIVAKKVNEILQADAINGTDNEVVTVTDENTGEISEKVKLGTKALAGQWLAYGVTRSVTKRSVMTLAYGSKEFGFRQQVLRHTIQWAIDSGKGLMFTQPNQAAGYMAKLIWESVSVTVVAAVEAMNWLKSAAKLLAAEVKDKKTGEILRKRCAVHWVTPDGFPVWQEYKKPIQTRLNLMFLGQFRLQPTINTNKDSEIDAHKQESGIAPNFVHSQDGSHLRKTVVWAHEKYGIESFALIHDSFGTIPADAANLFKAVRETMVDTYESCDVLADFYDQFADQLHESQLDKMPALPAKGNLNLRDILESDFAFA

SEQ ID NO: 473 - DNA, 2670 bp, synthetic construct
  misc_feature 1..2670: note = Variant of RNA polymerase
  source 1..2670: mol_type = other DNA
atgcaccatcaccatcaccatatgaacacgattaacatcgctaagaacgacttctctgacatcgaactggctgctatcccgttcaacactctggctgaccattacggtgagggcttagctcgcgaacagttggcccttgagcatgagtcttacgagatgggtgaagcacgtttccgcaagatgtttgagcgtcaacttaaagctggtgaggttgcggataacgctgccgccaagcctctcatcactaccctactccctaagatgattgcacgcatcaacgactggtttgaggaagtgcgtgctaagcgcggcaagcgcccgacagccttccagttcctgcaagaaatcaagccggaagccgtagcgtacatcaccattaagaccactctggcttgcctaaccagtgcggaccgtacaaccgttcaggctgtagcaagcgcaatcggtcgggccattgaggacgaggctcgcttcggtcgtatccgtgaccttgaagctaagcacttcaagaaaaactatgaggaacaactcaacaagcgcgtagggcacgtctacaagaaagcatttatgcaagttgtcgaggctgacatgctctctaagggtctactcggtggcgaggcgtggtcttcgtggcataaggaagactctattcatgtaggagtacgctgcatcgagatgctcattgagtcaaccggaatggttagcttacaccgccaaaatgctggcgtagtaggtcaagactctgagactatcgaactcgcacctgaatacgctgaggctatcgcaacccgtgcaggtgcgctggctggcatctctccgatgttccaaccttgcgtagttcctcctaagccgtggactggcattactggtggtggctattgggctaacggtcgtcgtcctctggcgctggtgcgtactcacagtaagaaaggtctgatgcgctacgaagacgtttacatgcctgaggtgtacaaagcgattaacattgcgcaaaacaccgcctggtcgatcaacaagtgggtcctggcggtcgccaacgtaatcaccaagtggaagcattgtccggtccgggacatccctgcgattgagcgtgaagaactcccgatgaaaccggaagacatcgacatgaatcctgaggctctcaccgcgtggaaacgtgctaaagctgctgtgtaccgcagagacaaggctcgcaagtctcgtcgtatcctgcttgagttcatgcttgagcaagccaataagtttgctaaccataaggccatctggttcccttacaacatggactggcgcggtcgtgtttacgctgtgtcaatgttcaacccgcaaggtaacgatatgaccaaaggactgcttacgctggcgaaaggtaaaccaatcggtaaggaaggttactactggctgaaaatccacggtgcaaactgtgcgggtgtcgataaggttccgttccctgagcgcatcaagttcattgaggaaaaccacgagaacatcatggcttgcgctaagtctccactggagaacacttggtgggctgagcaagatagtccgttctgcttccttgcgttctgctttgagtacgctggggtacagcaccacggcctgagctataactgctcccttccgctggcgtttgacgggtcttgctctggcatccagcacttctccgcgatgctccgagatgaggtaggtggtcgcgcggttaacttgcttcctagtgaaaccgttcaggacatctacgggattgttgctaagaaagtcaacgagattctacaagcagacgcaatcaatgggaccgataacgaagtagttaccgtgaccgatgagaacactggtgaaatctctgagaaagtcaagctgggcactaaggcactggctggtcaatggctggcttacggtgttactcgcagtgtgactaagcgttcagtcatgacgctggcttacgggtccaaagagttcggcttccgtcaacaagtgctgcgccacactattcagtgggctattgattccggcaagggtctgatgttcactcagccgaatcaggctgctggatacatggctaagctgatttgggaatctgtgagcgtgacggtggtagctgcggttgaagcaatgaactggcttaagtctgctgctaagctgctggctgctgaggtcaaagataagaagactggagagattcttcgcaagcgttgcgctgtgcattgggtaactcctgatggtttccctgtgtggcaggaatacaagaagcctattcagacgcgcttgaacctgatgttcctcggtcagttccgcttacagcctaccattaacaccaacaaagatagcgagattgatgcacataaacaggagtctggtatcgctcctaactttgtacacagccaagacggtagccaccttcgtaagactgtagtgtgggcacacgagaagtacggaatcgaatcttttgcactgattcacgactccttcggtaccattccggctgacgctgcgaacctgttcaaagcagtgcgcgaaactatggttgacacatatgagtcttgtgatgtactggctgatttctacgaccagttcgctgaccagttgcacgagtctcaattggacaaaatgccagcacttccggctaaaggtaacttgaacctccgtgacatcttagagtcggacttcgcgttcgcg

SEQ ID NO: 474 - protein, 890 aa, synthetic construct
  REGION 1..890: note = Variant of RNA polymerase
MHHHHHHMNTINIAKNDFSDIELAAIPFNTLADHYGEGLAREQLALEHESYEMGEARFRKMFERQLKAGEVADNAAAKPLITTLLPKMIARINDWFEEVRAKRGKRPTAFQFLQEIKPEAVAYITIKTTLACLTSADRTTVQAVASAIGRAIEDEARFGRIRDLEAKHFKKNYEEQLNKRVGHVYKKAFMQVVEADMLSKGLLGGEAWSSWHKEDSIHVGVRCIEMLIESTGMVSLHRQNAGVVGQDSETIELAPEYAEAIATRAGALAGISPMFQPCVVPPKPWTGITGGGYWANGRRPLALVRTHSKKGLMRYEDVYMPEVYKAINIAQNTAWSINKWVLAVANVITKWKHCPVRDIPAIEREELPMKPEDIDMNPEALTAWKRAKAAVYRRDKARKSRRILLEFMLEQANKFANHKAIWFPYNMDWRGRVYAVSMFNPQGNDMTKGLLTLAKGKPIGKEGYYWLKIHGANCAGVDKVPFPERIKFIEENHENIMACAKSPLENTWWAEQDSPFCFLAFCFEYAGVQHHGLSYNCSLPLAFDGSCSGIQHFSAMLRDEVGGRAVNLLPSETVQDIYGIVAKKVNEILQADAINGTDNEVVTVTDENTGEISEKVKLGTKALAGQWLAYGVTRSVTKRSVMTLAYGSKEFGFRQQVLRHTIQWAIDSGKGLMFTQPNQAAGYMAKLIWESVSVTVVAAVEAMNWLKSAAKLLAAEVKDKKTGEILRKRCAVHWVTPDGFPVWQEYKKPIQTRLNLMFLGQFRLQPTINTNKDSEIDAHKQESGIAPNFVHSQDGSHLRKTVVWAHEKYGIESFALIHDSFGTIPADAANLFKAVRETMVDTYESCDVLADFYDQFADQLHESQLDKMPALPAKGNLNLRDILESDFAFA

SEQ ID NO: 475 - DNA, 2670 bp, synthetic construct
  misc_feature 1..2670: note = Variant of RNA polymerase
  source 1..2670: mol_type = other DNA
atgcaccatcaccatcaccatatgaacacgattaacatcgctaagaacgacttctctgacatcgaactggctgctatcccgttcaacactctggctgaccattacggtgagggcttagctcgcgaacagttggcccttgagcatgagtcttacgagatgggtgaagcacgtttccgcaagatgtttgagcgtcaacttaaagctggtgaggttgcggataacgctgccgccaagcctctcatcactaccctactccctaagatgattgcacgcatcaacgactggtttgaggaagtgaaagctaagcgcggcaagcgcccgacagccttccagttcctgcaagaaatcaagccggaagccgtagcgtacatcaccattaagaccactctggcttgcctaaccagtgcggaccgtacaaccgttcaggctgtagcaagcgcaatcggtcgggccattgaggacgaggctcgcttcggtcgtatccgtgaccttgaagctaagcacttcaagaaaaactatgaggaacaactcaacaagcgcgtagggcacgtctacaagaaagcatttatgcaagttgtcgaggctgacatgctctctaagggtctactcggtggcgaggcgtggtcttcgtggcataaggaagactctattcatgtaggagtacgctgcatcgagatgctcattgagtcaaccggaatggttagcttacaccgccaaaatgctggcgtagtaggtcaagactctgagactatcgaactcgcacctgaatacgctgaggctatcgcaacccgtgcaggtgcgctggctggcatctctccgatgttccaaccttgcgtagttcctcctaagccgtggactggcattactggtggtggctattgggctaacggtcgtcgtcctctggcgctggtgcgtactcacagtaagaaaggtctgatgcgctacgaagacgtttacatgcctgaggtgtacaaagcgattaacattgcgcaaaacaccgcctggtcgatcaacaagtgggtcctggcggtcgccaacgtaatcaccaagtggaagcattgtccggtccgggacatccctgcgattgagcgtgaagaactcccgatgaaaccggaagacatcgacatgaatcctgaggctctcaccgcgtggaaacgtgctaaagctgctgtgtaccgcagagacaaggctcgcaagtctcgtcgtatcctgcttgagttcatgcttgagcaagccaataagtttgctaaccataaggccatctggttcccttacaacatggactggcgcggtcgtgtttacgctgtgtcaatgttcaacccgcaaggtaacgatatgaccaaaggactgcttacgctggcgaaaggtaaaccaatcggtaaggaaggttactactggctgaaaatccacggtgcaaactgtgcgggtgtcgataaggttccgttccctgagcgcatcaagttcattgaggaaaaccacgagaacatcatggcttgcgctaagtctccactggagaacacttggtgggctgagcaagatagtccgttctgcttccttgcgttctgctttgagtacgctggggtacagcaccacggcctgagctataactgctcccttccgctggcgtttgacgggtcttgctctggcatccagcacttctccgcgatgctccgagatgaggtaggtggtcgcgcggttaacttgcttcctagtgaaaccgttcaggacatctacgggattgttgctaagaaagtcaacgagattctacaagcagacgcaatcaatgggaccgataacgaagtagttaccgtgaccgatgagaacactggtgaaatctctgagaaagtcaagctgggcactaaggcactggctggtcaatggctggcttacggtgttactcgcagtgtgactaagcgttcagtcatgacgctggcttacgggtccaaagagttcggcttccgtcaacaagtgctgcgccacactattcagtgggctattgattccggcaagggtctgatgttcactcagccgaatcaggctgctggatacatggctaagctgatttgggaatctgtgagcgtgacggtggtagctgcggttgaagcaatgaactggcttaagtctgctgctaagctgctggctgctgaggtcaaagataagaagactggagagattcttcgcaagcgttgcgctgtgcattgggtaactcctgatggtttccctgtgtggcaggaatacaagaagcctattcagacgcgcttgaacctgatgttcctcggtcagttccgcttacagcctaccattaacaccaacaaagatagcaagattgatgcacgtaaacaggagtctggtatcgctcctaactttgtacacagccaagacggtagccaccttcgtaagactgtagtgtgggcacacgagaagtacggaatcgaatcttttgcactgattcacgactccttcggtaccattccggctgacgctgcgaacctgttcaaagcagtgcgcgaaactatggttgacacatatgagtcttgtgatgtactggctgatttctacgaccagttcgctgaccagttgcacgagtctcaattggacaaaatgccagcacttccggctaaaggtaacttgaacctccgtgacatcttagagtcggacttcgcgttcgcg

SEQ ID NO: 476 - protein, 890 aa, synthetic construct
  REGION 1..890: note = Variant of RNA polymerase
MHHHHHHMNTINIAKNDFSDIELAAIPFNTLADHYGEGLAREQLALEHESYEMGEARFRKMFERQLKAGEVADNAAAKPLITTLLPKMIARINDWFEEVKAKRGKRPTAFQFLQEIKPEAVAYITIKTTLACLTSADRTTVQAVASAIGRAIEDEARFGRIRDLEAKHFKKNYEEQLNKRVGHVYKKAFMQVVEADMLSKGLLGGEAWSSWHKEDSIHVGVRCIEMLIESTGMVSLHRQNAGVVGQDSETIELAPEYAEAIATRAGALAGISPMFQPCVVPPKPWTGITGGGYWANGRRPLALVRTHSKKGLMRYEDVYMPEVYKAINIAQNTAWSINKWVLAVANVITKWKHCPVRDIPAIEREELPMKPEDIDMNPEALTAWKRAKAAVYRRDKARKSRRILLEFMLEQANKFANHKAIWFPYNMDWRGRVYAVSMFNPQGNDMTKGLLTLAKGKPIGKEGYYWLKIHGANCAGVDKVPFPERIKFIEENHENIMACAKSPLENTWWAEQDSPFCFLAFCFEYAGVQHHGLSYNCSLPLAFDGSCSGIQHFSAMLRDEVGGRAVNLLPSETVQDIYGIVAKKVNEILQADAINGTDNEVVTVTDENTGEISEKVKLGTKALAGQWLAYGVTRSVTKRSVMTLAYGSKEFGFRQQVLRHTIQWAIDSGKGLMFTQPNQAAGYMAKLIWESVSVTVVAAVEAMNWLKSAAKLLAAEVKDKKTGEILRKRCAVHWVTPDGFPVWQEYKKPIQTRLNLMFLGQFRLQPTINTNKDSKIDARKQESGIAPNFVHSQDGSHLRKTVVWAHEKYGIESFALIHDSFGTIPADAANLFKAVRETMVDTYESCDVLADFYDQFADQLHESQLDKMPALPAKGNLNLRDILESDFAFA

SEQ ID NO: 477 - DNA, 2670 bp, synthetic construct
  misc_feature 1..2670: note = Variant of RNA polymerase
  source 1..2670: mol_type = other DNA
atgcaccatcaccatcaccatatgaacacgattaacatcgctaagaacgacttctctgacatcgaactggctgctatcccgttcaacactctggctgaccattacggtgagggcttagctcgcgaacagttggcccttgagcatgagtcttacgagatgggtgaagcacgtttccgcaagatgtttgagcgtcaacttaaagctggtgaggttgcggataacgctgccgccaagcctctcatcactaccctactccctaagatgattgcacgcatcaacgactggtttgaggaagtgaaagctaagcgcggcaagcgcccgacagccttccagttcctgcaagaaatcaagccggaagccgtagcgtacatcaccattaagaccactctggcttgcctaaccagtgcggaccgtacaaccgttcaggctgtagcaagcgcaatcggtcgggccattgaggacgaggctcgcttcggtcgtatccgtgaccttgaagctaagcacttcaagaaaaactatgaggaacaactcaacaagcgcgtagggcacgtctacaagaaagcatttatgcaagttgtcgaggctgacatgctctctaagggtctactcggtggcgaggcgtggtcttcgtggcataaggaagactctattcatgtaggagtacgctgcatcgagatgctcattgagtcaaccggaatggttagcttacaccgccaaaatgctggcgtagtaggtaaagactctgagactatcgaactcgcacctgaatacgctgaggctatcgcaacccgtgcaggtgcgctggctggcatctctccgatgttccaaccttgcgtagttcctcctaagccgtggactggcattactggtggtggctattgggctaacggtcgtcgtcctctggcgctggtgcgtactcacagtaagaaaggtctgatgcgctacgaagacgtttacatgcctgaggtgtacaaagcgattaacattgcgcaaaacaccgcctggtcgatcaacaagtgggtcctggcggtcgccaacgtaatcaccaagtggaagcattgtccggtccgggacatccctgcgattgagcgtgaagaactcccgatgaaaccggaagacatcgacatgaatcctgaggctctcaccgcgtggaaacgtgctaaagctgctgtgtaccgcagagacaaggctcgcaagtctcgtcgtatcctgcttgagttcatgcttgagcaagccaataagtttgctaaccataaggccatctggttcccttacaacatggactggcgcggtcgtgtttacgctgtgtcaatgttcaacccgcaaggtaacgatatgaccaaaggactgcttacgctggcgaaaggtaaaccaatcggtaaggaaggttactactggctgaaaatccacggtgcaaactgtgcgggtgtcgataaggttccgttccctgagcgcatcaagttcattgaggaaaaccacgagaacatcatggcttgcgctaagtctccactggagaacacttggtgggctgagcaagatagtccgttctgcttccttgcgttctgctttgagtacgctggggtacagcaccacggcctgagctataactgctcccttccgctggcgtttgacgggtcttgctctggcatccagcacttctccgcgatgctccgagatgaggtaggtggtcgcgcggttaacttgcttcctagtgaaaccgttcaggacatctacgggattgttgctaagaaagtcaacgagattctacaagcagacgcaatcaatgggaccgataacgaagtagttaccgtgaccgatgagaacactggtgaaatctctgagaaagtcaagctgggcactaaggcactggctggtcaatggctggcttacggtgttactcgcagtgtgactaagcgttcagtcatgacgctggcttacgggtccaaagagttcggcttccgtcaacaagtgctgcgccacactattcagtgggctattgattccggcaagggtctgatgttcactcagccgaatcaggctgctggatacatggctaagctgatttgggaatctgtgagcgtgacggtggtagctgcggttgaagcaatgaactggcttaagtctgctgctaagctgctggctgctgaggtcaaagataagaagactggagagattcttcgcaagcgttgcgctgtgcattgggtaactcctgatggtttccctgtgtggcaggaatacaagaagcctattcagacgcgcttgaacctgatgttcctcggtcagttccgcttacagcctaccattaacaccaacaaagatagcgagattgatgcacataaacaggagtctggtatcgctcctaactttgtacacagccaagacggtagccaccttcgtaagactgtagtgtgggcacacgagaagtacggaatcgaatcttttgcactgattcacgactccttcggtaccattccggctgacgctgcgaacctgttcaaagcagtgcgcgaaactatggttgacacatatgagtcttgtgatgtactggctgatttctacgaccagttcgctgaccagttgcacgagtctcaattggacaaaatgccagcacttccggctaaaggtaacttgaacctccgtgacatcttagagtcggacttcgcgttcgcg

SEQ ID NO: 478 - protein, 890 aa, synthetic construct
  REGION 1..890: note = Variant of RNA polymerase
MHHHHHHMNTINIAKNDFSDIELAAIPFNTLADHYGEGLAREQLALEHESYEMGEARFRKMFERQLKAGEVADNAAAKPLITTLLPKMIARINDWFEEVKAKRGKRPTAFQFLQEIKPEAVAYITIKTTLACLTSADRTTVQAVASAIGRAIEDEARFGRIRDLEAKHFKKNYEEQLNKRVGHVYKKAFMQVVEADMLSKGLLGGEAWSSWHKEDSIHVGVRCIEMLIESTGMVSLHRQNAGVVGKDSETIELAPEYAEAIATRAGALAGISPMFQPCVVPPKPWTGITGGGYWANGRRPLALVRTHSKKGLMRYEDVYMPEVYKAINIAQNTAWSINKWVLAVANVITKWKHCPVRDIPAIEREELPMKPEDIDMNPEALTAWKRAKAAVYRRDKARKSRRILLEFMLEQANKFANHKAIWFPYNMDWRGRVYAVSMFNPQGNDMTKGLLTLAKGKPIGKEGYYWLKIHGANCAGVDKVPFPERIKFIEENHENIMACAKSPLENTWWAEQDSPFCFLAFCFEYAGVQHHGLSYNCSLPLAFDGSCSGIQHFSAMLRDEVGGRAVNLLPSETVQDIYGIVAKKVNEILQADAINGTDNEVVTVTDENTGEISEKVKLGTKALAGQWLAYGVTRSVTKRSVMTLAYGSKEFGFRQQVLRHTIQWAIDSGKGLMFTQPNQAAGYMAKLIWESVSVTVVAAVEAMNWLKSAAKLLAAEVKDKKTGEILRKRCAVHWVTPDGFPVWQEYKKPIQTRLNLMFLGQFRLQPTINTNKDSEIDAHKQESGIAPNFVHSQDGSHLRKTVVWAHEKYGIESFALIHDSFGTIPADAANLFKAVRETMVDTYESCDVLADFYDQFADQLHESQLDKMPALPAKGNLNLRDILESDFAFA

SEQ ID NO: 479 - DNA, 2670 bp, synthetic construct
  misc_feature 1..2670: note = Variant of RNA polymerase
  source 1..2670: mol_type = other DNA
atgcaccatcaccatcaccatatgaacacgattaacatcgctaagaacgacttctctgacatcgaactggctgctatcccgttcaacactctggctgaccattacggtgagggcttagctcgcgaacagttggcccttgagcatgagtcttacgagatgggtgaagcacgtttccgcaagatgtttgagcgtcaacttaaagctggtgaggttgcggataacgctgccgccaagcctctcatcactaccctactccctaagatgattgcacgcatcaacgactggtttgaggaagtgaaagctaagcgcggcaagcgcccgacagccttccagttcctgcaagaaatcaagccggaagccgtagcgtacatcaccattaagaccactctggcttgcctaaccagtgcggaccgtacaaccgttcaggctgtagcaagcgcaatcggtcgggccattgaggacgaggctcgcttcggtcgtatccgtgaccttgaagctaagcacttcaagaaaaactatgaggaacaactcaacaagcgcgtagggcacgtctacaagaaagcatttatgcaagttgtcgaggctgacatgctctctaagggtctactcggtggcgaggcgtggtcttcgtggcataaggaagactctattcatgtaggagtacgctgcatcgagatgctcattgagtcaaccggaatggttagcttacaccgccaaaatgctggcgtagtaggtcaagactctgagactatcgaactcgcacctgaatacgctgaggctatcgcaacccgtgcaggtgcgctggctggcatctctccgatgttccaaccttgcgtagttcctcctaagccgtggactggcattactggtggtggctattgggctaacggtcgtcgtcctctggcgctggtgcgtactcacagtaagaaaggtctgatgcgctacgaagacgtttacatgcctgaggtgtacaaagcgattaacattgcgcaaaacaccgcctggtcgatcaacaagtgggtcctggcggtcgccaacgtaatcaccaagtggaagcattgtccggtccgggacatccctgcgattgagcgtgaagagctcccgatgaaaccggaagacatcgacatgaatcctgaggctctcaccgcgtggaaacgtgctaaagctgctgtgtaccgcagagacaaggctcgcaagtctcgtcgtatcctgcttgagttcatgcttgagcaagccaataagtttgctaaccataaggccatctggttcccttacaacatggactggcgcggtcgtgtttacgctgtgtcaatgttcaacccgcaaggtaacgatatgaccaaaggactgcttacgctggcgaaaggtaaaccaatcggtaaggaaggttactactggctgaaaatccacggtgcaaactgtgcgggtgtcgataaggttccgttccctgagcgcatcaagttcattgaggaaaaccacgagaacatcatggcttgcgctaagtctccactggagaacacttggtgggctgagcaagatagtccgttctgcttccttgcgttctgctttgagtacgctggggtacagcaccacggcctgagctataactgctcccttccgctggcgtttgacgggtcttgctctggcatccagcacttctccgcgatgctccgagatgaggtaggtggtcgcgcggttaacttgcttcctagtgaaaccgttcaggacatctacgggattgttgctaagaaagtcaacgagattctacaagcagacgcaatcaatgggaccgataacgaagtagttaccgtgaccgatgagaacactggtgaaatctctgagaaagtcaagctgggcactaaggcactggctggtcaatggctggcttacggtgttactcgcagtgtgactaagcgttcagtcatgacgctggcttacgggtccaaagagttcggcttccgtcaacaagtgctgcgccacactattcagtgggctattgattccggcaagggtctgatgttcactcagccgaatcaggctgctggatacatggctaagctgatttgggaatctgtgagcgtgacggtggtagctgcggttgaagcaatgaactggcttaagtctgctgctaagctgctggctgctgaggtcaaagataagaagactggagagattcttcgcaagcgttgcgctgtgcattgggtaactcctgatggtttccctgtgtggcaggaatacaagaagcctattcagacgcgcttgaacctgatgttcctcggtcagttccgcttacagcctaccattaacaccaacaaagatagcgagattgatgcacgtaaacagcgttctggtatcgctcctaactttgtacacagccaagacggtagccaccttcgtaagactgtagtgtgggcacacgagaagtacggaatcgaatcttttgcactgattcacgactccttcggtaccattccggctgacgctgcgaacctgttcaaagcagtgcgcgaaactatggttgacacatatgagtcttgtgatgtactggctgatttctacgaccagttcgctgaccagttgcacgagtctcaattggacaaaatgccagcacttccggctaaaggtaacttgaacctccgtgacatcttagagtcggacttcgcgttcgcg

SEQ ID NO: 480 - protein, 890 aa, synthetic construct
  REGION 1..890: note = Variant of RNA polymerase
MHHHHHHMNTINIAKNDFSDIELAAIPFNTLADHYGEGLAREQLALEHESYEMGEARFRKMFERQLKAGEVADNAAAKPLITTLLPKMIARINDWFEEVKAKRGKRPTAFQFLQEIKPEAVAYITIKTTLACLTSADRTTVQAVASAIGRAIEDEARFGRIRDLEAKHFKKNYEEQLNKRVGHVYKKAFMQVVEADMLSKGLLGGEAWSSWHKEDSIHVGVRCIEMLIESTGMVSLHRQNAGVVGQDSETIELAPEYAEAIATRAGALAGISPMFQPCVVPPKPWTGITGGGYWANGRRPLALVRTHSKKGLMRYEDVYMPEVYKAINIAQNTAWSINKWVLAVANVITKWKHCPVRDIPAIEREELPMKPEDIDMNPEALTAWKRAKAAVYRRDKARKSRRILLEFMLEQANKFANHKAIWFPYNMDWRGRVYAVSMFNPQGNDMTKGLLTLAKGKPIGKEGYYWLKIHGANCAGVDKVPFPERIKFIEENHENIMACAKSPLENTWWAEQDSPFCFLAFCFEYAGVQHHGLSYNCSLPLAFDGSCSGIQHFSAMLRDEVGGRAVNLLPSETVQDIYGIVAKKVNEILQADAINGTDNEVVTVTDENTGEISEKVKLGTKALAGQWLAYGVTRSVTKRSVMTLAYGSKEFGFRQQVLRHTIQWAIDSGKGLMFTQPNQAAGYMAKLIWESVSVTVVAAVEAMNWLKSAAKLLAAEVKDKKTGEILRKRCAVHWVTPDGFPVWQEYKKPIQTRLNLMFLGQFRLQPTINTNKDSEIDARKQRSGIAPNFVHSQDGSHLRKTVVWAHEKYGIESFALIHDSFGTIPADAANLFKAVRETMVDTYESCDVLADFYDQFADQLHESQLDKMPALPAKGNLNLRDILESDFAFA

SEQ ID NO: 481 - DNA, 2670 bp, synthetic construct
  misc_feature 1..2670: note = Variant of RNA polymerase
  source 1..2670: mol_type = other DNA
atgcaccatcaccatcaccatatgaacacgattaacatcgctaagaacgacttctctgacatcgaactggctgctatcccgttcaacactctggctgaccattacggtgagggcttagctcgcgaacagttggcccttgagcatgagtcttacgagatgggtgaagcacgtttccgcaagatgtttgagcgtcaacttaaagctggtgaggttgcggataacgctgccgccaagcctctcatcactaccctactccctaagatgattgcacgcatcaacgactggtttgaggaagtgaaagctaagcgcggcaagcgcccgacagccttccagttcctgcaagaaatcaagccggaagccgtagcgtacatcaccattaagaccactctggcttgcctaaccagtgcggaccgtacaaccgttcaggctgtagcaagcgcaatcggtcgggccattgaggacgaggctcgcttcggtcgtatccgtgaccttgaagctaagcacttcaagaaaaactatgaggaacaactcaacaagcgcgtagggcacgtctacaagaaagcatttatgcaagttgtcgaggctgacatgctctctaagggtctactcggtggcgaggcgtggtcttcgtggcataaggaagactctattcatgtaggagtacgctgcatcgagatgctcattgagtcaaccggaatggttagcttacaccgccaaaatgctggcgtagtaggtcaagactctgagactatcgaactcgcacctgaatacgctgaggctatcgcaacccgtgcaggtgcgctggctggcatctctccgatgttccaaccttgcgtagttcctcctaagccgtggactggcattactggtggtggctattgggctaacggtcgtcgtcctctggcgctggtgcgtactcacagtaagaaaggtctgatgcgctacgaagacgtttacatgcctgaggtgtacaaagcgattaacattgcgcaaaacaccgcctggtcgatcaacaagtgggtcctggcggtcgccaacgtaatcaccaagtggaagcattgtccggtccgggacatccctgcgattgagcgtgaagaactcccgatgaaaccggaagacatcgacatgaatcctgaggctctcaccgcgtggaaacgtgctaaagctgctgtgtaccgcagagacaaggctcgcaagtctcgtcgtatcctgcttgagttcatgcttgagcaagccaataagtttgctaaccataaggccatctggttcccttacaacatggactggcgcggtcgtgtttacgctgtgtcaatgttcaacccgcaaggtaacgatatgaccaaaggactgcttacgctggcgaaaggtaaaccaatcggtaaggaaggttactactggctgaaaatccacggtgcaaactgtgcgggtgtcgataaggttccgttccctgagcgcatcaagttcattgaggaaaaccacgagaacatcatggcttgcgctaagtctccactggagaacacttggtgggctgagcaagatagtccgttctgcttccttgcgttctgctttgagtacgctggggtacagcaccacggcctgagctataactgctcccttccgctggcgtttgacgggtcttgctctggcatccagcacttctccgcgatgctccgagatgaggtaggtggtcgcgcggttaacttgcttcctagtgaaaccgttcaggacatctacgggattgttgctaagaaagtcaacgagattctacaagcagacgcaatcaatgggaccgataacgaagtagttaccgtgaccgatgagaacactggtgaaatctctgagaaagtcaagctgggcactaaggcactggctggtcaatggctggcttacggtgttactcgcagtgtgactaagcgttcagtcatgacgctggcttacgggtccaaagagttcggcttccgtcaacaagtgctgcgccacactattcagtgggctattgattccggcaagggtctgatgttcactcagccgaatcaggctgctggatacatggctaagctgatttgggaatctgtgagcgtgacggtggtagctgcggttgaagcaatgaactggcttaagtctgctgctaagctgctggctgctgaggtcaaagataagaagactggagagattcttcgcaagcgttgcgctgtgcattgggtaactcctgatggtttccctgtgtggcaggaatacaagaagcgcattcagacgcgcttgaacctgatgttcctcggtcagttccgcttacagcctaccattaacaccaacaaagatagcgagattgatgcacataaacaggagtctggtatcgctcctaactttgtacacagccaagacggtagccaccttcgtaagactgtagtgtgggcacacgagaagtacggaatcgaatcttttgcactgattcacgactccttcggtaccattccggctgacgctgcgaacctgttcaaagcagtgcgcgaaactatggttgacacatatgagtcttgtgatgtactggctgatttctacgaccagttcgctgaccagttgcacgagtctcaattggacaaaatgccagcacttccggctaaaggtaacttgaacctccgtgacatcttagagtcggacttcgcgttcgcg

SEQ ID NO: 482 - protein, 890 aa, synthetic construct
  REGION 1..890: note = Variant of RNA polymerase
MHHHHHHMNTINIAKNDFSDIELAAIPFNTLADHYGEGLAREQLALEHESYEMGEARFRKMFERQLKAGEVADNAAAKPLITTLLPKMIARINDWFEEVKAKRGKRPTAFQFLQEIKPEAVAYITIKTTLACLTSADRTTVQAVASAIGRAIEDEARFGRIRDLEAKHFKKNYEEQLNKRVGHVYKKAFMQVVEADMLSKGLLGGEAWSSWHKEDSIHVGVRCIEMLIESTGMVSLHRQNAGVVGQDSETIELAPEYAEAIATRAGALAGISPMFQPCVVPPKPWTGITGGGYWANGRRPLALVRTHSKKGLMRYEDVYMPEVYKAINIAQNTAWSINKWVLAVANVITKWKHCPVRDIPAIEREELPMKPEDIDMNPEALTAWKRAKAAVYRRDKARKSRRILLEFMLEQANKFANHKAIWFPYNMDWRGRVYAVSMFNPQGNDMTKGLLTLAKGKPIGKEGYYWLKIHGANCAGVDKVPFPERIKFIEENHENIMACAKSPLENTWWAEQDSPFCFLAFCFEYAGVQHHGLSYNCSLPLAFDGSCSGIQHFSAMLRDEVGGRAVNLLPSETVQDIYGIVAKKVNEILQADAINGTDNEVVTVTDENTGEISEKVKLGTKALAGQWLAYGVTRSVTKRSVMTLAYGSKEFGFRQQVLRHTIQWAIDSGKGLMFTQPNQAAGYMAKLIWESVSVTVVAAVEAMNWLKSAAKLLAAEVKDKKTGEILRKRCAVHWVTPDGFPVWQEYKKRIQTRLNLMFLGQFRLQPTINTNKDSEIDAHKQESGIAPNFVHSQDGSHLRKTVVWAHEKYGIESFALIHDSFGTIPADAANLFKAVRETMVDTYESCDVLADFYDQFADQLHESQLDKMPALPAKGNLNLRDILESDFAFA

SEQ ID NO: 483 - DNA, 2670 bp, synthetic construct
  misc_feature 1..2670: note = Variant of RNA polymerase
  source 1..2670: mol_type = other DNA
atgcaccatcaccatcaccatatgaacacgattaacatcgctaagaacgacttctctgacatcgaactggctgctatcccgttcaacactctggctgaccattacggtgagggcttagctcgcgaacagttggcccttgagcatgagtcttacgagatgggtgaagcacgtttccgcaagatgtttgagcgtcaacttaaagctggtgaggttgcggataacgctgccgccaagcctctcatcactaccctactccctaagatgattgcacgcatcaacgactggtttgaggaagtgaaagctaagcgcggcaagcgcccgacagccttccagttcctgcaagaaatcaagccggaagccgtagcgtacatcaccattaagaccactctggcttgcctaaccagtgcggaccgtacaaccgttcaggctgtagcaagcgcaatcggtcgggccattgaggacgaggctcgcttcggtcgtatccgtgaccttgaagctaagcacttcaagaaaaactatgaggaacaactcaacaagcgcgtagggcacgtctacaagaaagcatttatgcaagttgtcgaggctgacatgctctctaagggtctactcggtggcgaggcgtggtcttcgtggcataaggaagactctattcatgtaggagtacgctgcatcgagatgctcattgagtcaaccggaatggttagcttattgcgccaaaatgctggcgtagtaggtcaagactctgagactatcgaactcgcacctgaatacgctgaggctatcgcaacccgtgcaggtgcgctggctggcatctctccgatgttccaaccttgcgtagttcctcctaagccgtggactggcattactggtggtggctattgggctaacggtcgtcgtcctctggcgctggtgcgtactcacagtaagaaaggtctgatgcgctacgaagacgtttacatgcctgaggtgtacaaagcgattaacattgcgcaaaacaccgcctggtcgatcaacaagtgggtcctggcggtcgccaacgtaatcaccaagtggaagcattgtccggtccgggacatccctgcgattgagcgtgaagaactcccgatgaaaccggaagacatcgacatgaatcctgaggctctcaccgcgtggaaacgtgctaaagctgctgtgtaccgcagagacaaggctcgcaagtctcgtcgtatcctgcttgagttcatgcttgagcaagccaataagtttgctaaccataaggccatctggttcccttacaacatggactggcgcggtcgtgtttacgctgtgtcaatgttcaacccgcaaggtaacgatatgaccaaaggactgcttacgctggcgaaaggtaaaccaatcggtaaggaaggttactactggctgaaaatccacggtgcaaactgtgcgggtgtcgataaggttccgttccctgagcgcatcaagttcattgaggaaaaccacgagaacatcatggcttgcgctaagtctccactggagaacacttggtgggctgagcaagatagtccgttctgcttccttgcgttctgctttgagtacgctggggtacagcaccacggcctgagctataactgctcccttccgctggcgtttgacgggtcttgctctggcatccagcacttctccgcgatgctccgagatgaggtaggtggtcgcgcggttaacttgcttcctagtgaaaccgttcaggacatctacgggattgttgctaagaaagtcaacgagattctacaagcagacgcaatcaatgggaccgataacgaagtagttaccgtgaccgatgagaacactggtgaaatctctgagaaagtcaagctgggcactaaggcactggctggtcaatggctggcttacggtgttactcgcagtgtgactaagcgttcagtcatgacgctggcttacgggtccaaagagttcggcttccgtcaacaagtgctgcgccacactattcagtgggctattgattccggcaagggtctgatgttcactcagccgaatcaggctgctggatacatggctaagctgatttgggaatctgtgagcgtgacggtggtagctgcggttgaagcaatgaactggcttaagtctgctgctaagctgctggctgctgaggtcaaagataagaagactggagagattcttcgcaagcgttgcgctgtgcattgggtaactcctgatggtttccctgtgtggcaggaatacaagaagcctattcagacgcgcttgaacctgatgttcctcggtcagttccgcttacagcctaccattaacaccaacaaagatagcgagattgatgcacataaacaggagtctggtatcgctcctaactttgtacacagccaagacggtagccaccttcgtaagactgtagtgtgggcacacgagaagtacggaatcgaatcttttgcactgattcacgactccttcggtaccattccggctgacgctgcgaacctgttcaaagcagtgcgcgaaactatggttgacacatatgagtcttgtgatgtactggctgatttctacgaccagttcgctgaccagttgcacgagtctcaattggacaaaatgccagcacttccggctaaaggtaacttgaacctccgtgacatcttagagtcggacttcgcgttcgcg

SEQ ID NO: 484 - protein, 890 aa, synthetic construct
  REGION 1..890: note = Variant of RNA polymerase
MHHHHHHMNTINIAKNDFSDIELAAIPFNTLADHYGEGLAREQLALEHESYEMGEARFRKMFERQLKAGEVADNAAAKPLITTLLPKMIARINDWFEEVKAKRGKRPTAFQFLQEIKPEAVAYITIKTTLACLTSADRTTVQAVASAIGRAIEDEARFGRIRDLEAKHFKKNYEEQLNKRVGHVYKKAFMQVVEADMLSKGLLGGEAWSSWHKEDSIHVGVRCIEMLIESTGMVSLLRQNAGVVGQDSETIELAPEYAEAIATRAGALAGISPMFQPCVVPPKPWTGITGGGYWANGRRPLALVRTHSKKGLMRYEDVYMPEVYKAINIAQNTAWSINKWVLAVANVITKWKHCPVRDIPAIEREELPMKPEDIDMNPEALTAWKRAKAAVYRRDKARKSRRILLEFMLEQANKFANHKAIWFPYNMDWRGRVYAVSMFNPQGNDMTKGLLTLAKGKPIGKEGYYWLKIHGANCAGVDKVPFPERIKFIEENHENIMACAKSPLENTWWAEQDSPFCFLAFCFEYAGVQHHGLSYNCSLPLAFDGSCSGIQHFSAMLRDEVGGRAVNLLPSETVQDIYGIVAKKVNEILQADAINGTDNEVVTVTDENTGEISEKVKLGTKALAGQWLAYGVTRSVTKRSVMTLAYGSKEFGFRQQVLRHTIQWAIDSGKGLMFTQPNQAAGYMAKLIWESVSVTVVAAVEAMNWLKSAAKLLAAEVKDKKTGEILRKRCAVHWVTPDGFPVWQEYKKPIQTRLNLMFLGQFRLQPTINTNKDSEIDAHKQESGIAPNFVHSQDGSHLRKTVVWAHEKYGIESFALIHDSFGTIPADAANLFKAVRETMVDTYESCDVLADFYDQFADQLHESQLDKMPALPAKGNLNLRDILESDFAFA

SEQ ID NO: 485 - DNA, 2670 bp, synthetic construct
  misc_feature 1..2670: note = Variant of RNA polymerase
  source 1..2670: mol_type = other DNA
atgcaccatcaccatcaccatatgaacacgattaacatcgctaagaacgacttctctgacatcgaactggctgctatcccgttcaacactctggctgaccattacggtgagggcttagctcgcgaacagttggcccttgagcatgagtcttacgagatgggtgaagcacgtttccgcaagatgtttgagcgtcaacttaaagctggtgaggttgcggataacgctgccgccaagcctctcatcactaccctactccctaagatgattgcacgcatcaacgactggtttgaggaagtgaaagctaagcgcggcaagcgcccgacagccttccagttcctgcaagaaatcaagccggaagccgtagcgtacatcaccattaagaccactctggcttgcctaaccagtgcggaccgtacaaccgttcaggctgtagcaagcgcaatcggtcgggccattgaggacgaggctcgcttcggtcgtatcgtggaccttgaagctaagcacttcaagaaaaactatgaggaacaactcaacaagcgcgtagggcacgtctacaagaaagcatttatgcaagttgtcgaggctgacatgctctctaagggtctactcggtggcgaggcgtggtcttcgtggcataaggaagactctattcatgtaggagtacgctgcatcgagatgctcattgagtcaaccggaatggttagcttacaccgccaaaatgctggcgtagtaggtcaagactctgagactatcgaactcgcacctgaatacgctgaggctatcgcaacccgtgcaggtgcgctggctggcatctctccgatgttccaaccttgcgtagttcctcctaagccgtggactggcattactggtggtggctattgggctaacggtcgtcgtcctctggcgctggtgcgtactcacagtaagaaaggtctgatgcgctacgaagacgtttacatgcctgaggtgtacaaagcgattaacattgcgcaaaacaccgcctggtcgatcaacaagtgggtcctggcggtcgccaacgtaatcaccaagtggaagcattgtccggtccgggacatccctgcgattgagcgtgaagaactcccgatgaaaccggaagacatcgacatgaatcctgaggctctcaccgcgtggaaacgtgctaaagctgctgtgtaccgcagagacaaggctcgcaagtctcgtcgtatcctgcttgagttcatgcttgagcaagccaataagtttgctaaccataaggccatctggttcccttacaacatggactggcgcggtcgtgtttacgctgtgtcaatgttcaacccgcaaggtaacgatatgaccaaaggactgcttacgctggcgaaaggtaaaccaatcggtaaggaaggttactactggctgaaaatccacggtgcaaactgtgcgggtgtcgataaggttccgttccctgagcgcatcaagttcattgaggaaaaccacgagaacatcatggcttgcgctaagtctccactggagaacacttggtgggctgagcaagatagtccgttctgcttccttgcgttctgctttgagtacgctggggtacagcaccacggcctgagctataactgctcccttccgctggcgtttgacgggtcttgctctggcatccagcacttctccgcgatgctccgagatgaggtaggtggtcgcgcggttaacttgcttcctagtgaaaccgttcaggacatctacgggattgttgctaagaaagtcaacgagattctacaagcagacgcaatcaatgggaccgataacgaagtagttaccgtgaccgatgagaacactggtgaaatctctgagaaagtcaagctgggcactaaggcactggctggtcaatggctggcttacggtgttactcgcagtgtgactaagcgttcagtcatgacgctggcttacgggtccaaagagttcggcttccgtcaacaagtgctgcgccacactattcagtgggctattgattccggcaagggtctgatgttcactcagccgaatcaggctgctggatacatggctaagctgatttgggaatctgtgagcgtgacggtggtagctgcggttgaagcaatgaactggcttaagtctgctgctaagctgctggctgctgaggtcaaagataagaagactggagagattcttcgcaagcgttgcgctgtgcattgggtaactcctgatggtttccctgtgtggcaggaatacaagaagcctattcagacgcgcttgaacctgatgttcctcggtcagttccgcttacagcctaccattaacaccaacaaagatagcgagattgatgcacataaacaggagtctggtatcgctcctaactttgtacacagccaagacggtagccaccttcgtaagactgtagtgtgggcacacgagaagtacggaatcgaatcttttgcactgattcacgactccttcggtaccattccggctgacgctgcgaacctgttcaaagcagtgcgcgaaactatggttgacacatatgagtcttgtgatgtactggctgatttctacgaccagttcgctgaccagttgcacgagtctcaattggacaaaatgccagcacttccggctaaaggtaacttgaacctccgtgacatcttagagtcggacttcgcgttcgcg

SEQ ID NO: 486 - protein, 890 aa, synthetic construct
  REGION 1..890: note = Variant of RNA polymerase
MHHHHHHMNTINIAKNDFSDIELAAIPFNTLADHYGEGLAREQLALEHESYEMGEARFRKMFERQLKAGEVADNAAAKPLITTLLPKMIARINDWFEEVKAKRGKRPTAFQFLQEIKPEAVAYITIKTTLACLTSADRTTVQAVASAIGRAIEDEARFGRIVDLEAKHFKKNYEEQLNKRVGHVYKKAFMQVVEADMLSKGLLGGEAWSSWHKEDSIHVGVRCIEMLIESTGMVSLHRQNAGVVGQDSETIELAPEYAEAIATRAGALAGISPMFQPCVVPPKPWTGITGGGYWANGRRPLALVRTHSKKGLMRYEDVYMPEVYKAINIAQNTAWSINKWVLAVANVITKWKHCPVRDIPAIEREELPMKPEDIDMNPEALTAWKRAKAAVYRRDKARKSRRILLEFMLEQANKFANHKAIWFPYNMDWRGRVYAVSMFNPQGNDMTKGLLTLAKGKPIGKEGYYWLKIHGANCAGVDKVPFPERIKFIEENHENIMACAKSPLENTWWAEQDSPFCFLAFCFEYAGVQHHGLSYNCSLPLAFDGSCSGIQHFSAMLRDEVGGRAVNLLPSETVQDIYGIVAKKVNEILQADAINGTDNEVVTVTDENTGEISEKVKLGTKALAGQWLAYGVTRSVTKRSVMTLAYGSKEFGFRQQVLRHTIQWAIDSGKGLMFTQPNQAAGYMAKLIWESVSVTVVAAVEAMNWLKSAAKLLAAEVKDKKTGEILRKRCAVHWVTPDGFPVWQEYKKPIQTRLNLMFLGQFRLQPTINTNKDSEIDAHKQESGIAPNFVHSQDGSHLRKTVVWAHEKYGIESFALIHDSFGTIPADAANLFKAVRETMVDTYESCDVLADFYDQFADQLHESQLDKMPALPAKGNLNLRDILESDFAFA

SEQ ID NO: 487 - DNA, 2670 bp, synthetic construct
  misc_feature 1..2670: note = Variant of RNA polymerase
  source 1..2670: mol_type = other DNA
atgcaccatcaccatcaccatatgaacacgattaacatcgctaagaacgacttctctgacatcgaactggctgctatcccgttcaacactctggctgaccattacggtgagggcttagctcgcgaacagttggcccttgagcatgagtcttacgagatgggtgaagcacgtttccgcaagatgtttgagcgtcaacttaaagctggtgaggttgcggataacgctgccgccaagcctctcatcactaagctactccctaagatgattgcacgcatcaacgactggtttgaggaagtgaaagctaagcgcggcaagcgcccgacagccttccagttcctgcaagaaatcaagccggaagccgtagcgtacatcaccattaagaccactctggcttgcctaaccagtgcggaccgtacaaccgttcaggctgtagcaagcgcaatcggtcgggccattgaggacgaggctcgcttcggtcgtatccgtgaccttgaagctaagcacttcaagaaaaactatgaggaacaactcaacaagcgcgtagggcacgtctacaagaaagcatttatgcaagttgtcgaggctgacatgctctctaagggtctactcggtggcgaggcgtggtcttcgtggcataaggaagactctattcatgtaggagtacgctgcatcgagatgctcattgagtcaaccggaatggttagcttacaccgccaaaatgctggcgtagtaggtcaagactctgagactatcgaactcgcacctgaatacgctgaggctatcgcaacccgtgcaggtgcgctggctggcatctctccgatgttccaaccttgcgtagttcctcctaagccgtggactggcattactggtggtggctattgggctaacggtcgtcgtcctctggcgctggtgcgtactcacagtaagaaaggtctgatgcgctacgaagacgtttacatgcctgaggtgtacaaagcgattaacattgcgcaaaacaccgcctggtcgatcaacaagtgggtcctggcggtcgccaacgtaatcaccaagtggaagcattgtccggtccgggacatccctgcgattgagcgtgaagaactcccgatgaaaccggaagacatcgacatgaatcctgaggctctcaccgcgtggaaacgtgctaaagctgctgtgtaccgcagagacaaggctcgcaagtctcgtcgtatcctgcttgagttcatgcttgagcaagccaataagtttgctaaccataaggccatctggttcccttacaacatggactggcgcggtcgtgtttacgctgtgtcaatgttcaacccgcaaggtaacgatatgaccaaaggactgcttacgctggcgaaaggtaaaccaatcggtaaggaaggttactactggctgaaaatccacggtgcaaactgtgcgggtgtcgataaggttccgttccctgagcgcatcaagttcattgaggaaaaccacgagaacatcatggcttgcgctaagtctccactggagaacacttggtgggctgagcaagatagtccgttctgcttccttgcgttctgctttgagtacgctggggtacagcaccacggcctgagctataactgctcccttccgctggcgtttgacgggtcttgctctggcatccagcacttctccgcgatgctccgagatgaggtaggtggtcgcgcggttaacttgcttcctagtgaaaccgttcaggacatctacgggattgttgctaagaaagtcaacgagattctacaagcagacgcaatcaatgggaccgataacgaagtagttaccgtgaccgatgagaacactggtgaaatctctgagaaagtcaagctgggcactaaggcactggctggtcaatggctggcttacggtgttactcgcagtgtgactaagcgttcagtcatgacgctggcttacgggtccaaagagttcggcttccgtcaacaagtgctgcgccacactattcagtgggctattgattccggcaagggtctgatgttcactcagccgaatcaggctgctggatacatggctaagctgatttgggaatctgtgagcgtgacggtggtagctgcggttgaagcaatgaactggcttaagtctgctgctaagctgctggctgctgaggtcaaagataagaagactggagagattcttcgcaagcgttgcgctgtgcattgggtaactcctgatggtttccctgtgtggcaggaatacaagaagcctattcagacgcgcttgaacctgatgttcctcggtcagttccgcttacagcctaccattaacaccaacaaagatagcgagattgatgcacataaacaggagtctggtatcgctcctaactttgtacacagccaagacggtagccaccttcgtaagactgtagtgtgggcacacgagaagtacggaatcgaatcttttgcactgattcacgactccttcggtaccattccggctgacgctgcgaacctgttcaaagcagtgcgcgaaactatggttgacacatatgagtcttgtgatgtactggctgatttctacgaccagttcgctgaccagttgcacgagtctcaattggacaaaatgccagcacttccggctaaaggtaacttgaacctccgtgacatcttagagtcggacttcgcgttcgcg

SEQ ID NO: 488 - protein, 890 aa, synthetic construct
  REGION 1..890: note = Variant of RNA polymerase
MHHHHHHMNTINIAKNDFSDIELAAIPFNTLADHYGEGLAREQLALEHESYEMGEARFRKMFERQLKAGEVADNAAAKPLITKLLPKMIARINDWFEEVKAKRGKRPTAFQFLQEIKPEAVAYITIKTTLACLTSADRTTVQAVASAIGRAIEDEARFGRIRDLEAKHFKKNYEEQLNKRVGHVYKKAFMQVVEADMLSKGLLGGEAWSSWHKEDSIHVGVRCIEMLIESTGMVSLHRQNAGVVGQDSETIELAPEYAEAIATRAGALAGISPMFQPCVVPPKPWTGITGGGYWANGRRPLALVRTHSKKGLMRYEDVYMPEVYKAINIAQNTAWSINKWVLAVANVITKWKHCPVRDIPAIEREELPMKPEDIDMNPEALTAWKRAKAAVYRRDKARKSRRILLEFMLEQANKFANHKAIWFPYNMDWRGRVYAVSMFNPQGNDMTKGLLTLAKGKPIGKEGYYWLKIHGANCAGVDKVPFPERIKFIEENHENIMACAKSPLENTWWAEQDSPFCFLAFCFEYAGVQHHGLSYNCSLPLAFDGSCSGIQHFSAMLRDEVGGRAVNLLPSETVQDIYGIVAKKVNEILQADAINGTDNEVVTVTDENTGEISEKVKLGTKALAGQWLAYGVTRSVTKRSVMTLAYGSKEFGFRQQVLRHTIQWAIDSGKGLMFTQPNQAAGYMAKLIWESVSVTVVAAVEAMNWLKSAAKLLAAEVKDKKTGEILRKRCAVHWVTPDGFPVWQEYKKPIQTRLNLMFLGQFRLQPTINTNKDSEIDAHKQESGIAPNFVHSQDGSHLRKTVVWAHEKYGIESFALIHDSFGTIPADAANLFKAVRETMVDTYESCDVLADFYDQFADQLHESQLDKMPALPAKGNLNLRDILESDFAFA

SEQ ID NO: 489 - DNA, 2670 bp, synthetic construct
  misc_feature 1..2670: note = Variant of RNA polymerase
  source 1..2670: mol_type = other DNA
atgcaccatcaccatcaccatatgaacacgattaacatcgctaagaacgacttctctgacatcgaactggctgctatcccgttcaacactctggctgaccattacggtgagggcttagctcgcgaacagttggcccttgagcatgagtcttacgagatgggtgaagcacgtttccgcaagatgtttgagcgtcaacttaaagctggtgaggttgcggataacgctgccgccaagcctctcatcactaccctactccctaagatgattgcacgcatcaacgactggtttgaggaagtgaaagctaagcgcggcaagcgcccgacagccttccagttcctgcaagaaatcaagccggaagccgtagcgtacatcaccattaagaccactctggcttgcctaaccagtgcggaccgtacaaccgttcaggctgtagcaagcgcaatcggtcgggccattgaggacgaggctcgcttcggtcgtatccgtgaccttgaagctaagcacttcaagaaaaactatgaggaacaactcaacaagcgcgtagggcacgtctacaagaaagcatttatgcaagttgtcgaggctgacatgctctctaagggtctactcggtggcgaggcgtggtcttcgtggcataaggaagactctattacggtaggagtacgctgcatcgagatgctcattgagtcaaccggaatggttagcttacaccgccaaaatgctggcgtagtaggtcaagactctgagactatcgaactcgcacctgaatacgctgaggctatcgcaacccgtgcaggtgcgctggctggcatctctccgatgttccaaccttgcgtagttcctcctaagccgtggactggcattactggtggtggctattgggctaacggtcgtcgtcctctggcgctggtgcgtactcacagtaagaaaggtctgatgcgctacgaagacgtttacatgcctgaggtgtacaaagcgattaacattgcgcaaaacaccgcctggtcgatcaacaagtgggtcctggcggtcgccaacgtaatcaccaagtggaagcattgtccggtccgggacatccctgcgattgagcgtgaagaactcccgatgaaaccggaagacatcgacatgaatcctgaggctctcaccgcgtggaaacgtgctaaagctgctgtgtaccgcagagacaaggctcgcaagtctcgtcgtatcctgcttgagttcatgcttgagcaagccaataagtttgctaaccataaggccatctggttcccttacaacatggactggcgcggtcgtgtttacgctgtgtcaatgttcaacccgcaaggtaacgatatgaccaaaggactgcttacgctggcgaaaggtaaaccaatcggtaaggaaggttactactggctgaaaatccacggtgcaaactgtgcgggtgtcgataaggttccgttccctgagcgcatcaagttcattgaggaaaaccacgagaacatcatggcttgcgctaagtctccactggagaacacttggtgggctgagcaagatagtccgttctgcttccttgcgttctgctttgagtacgctggggtacagcaccacggcctgagctataactgctcccttccgctggcgtttgacgggtcttgctctggcatccagcacttctccgcgatgctccgagatgaggtaggtggtcgcgcggttaacttgcttcctagtgaaaccgttcaggacatctacgggattgttgctaagaaagtcaacgagattctacaagcagacgcaatcaatgggaccgataacgaagtagttaccgtgaccgatgagaacactggtgaaatctctgagaaagtcaagctgggcactaaggcactggctggtcaatggctggcttacggtgttactcgcagtgtgactaagcgttcagtcatgacgctggcttacgggtccaaagagttcggcttccgtcaacaagtgctgcgccacactattcagtgggctattgattccggcaagggtctgatgttcactcagccgaatcaggctgctggatacatggctaagctgatttgggaatctgtgagcgtgacggtggtagctgcggttgaagcaatgaactggcttaagtctgctgctaagctgctggctgctgaggtcaaagataagaagactggagagattcttcgcaagcgttgcgctgtgcattgggtaactcctgatggtttccctgtgtggcaggaatacaagaagcctattcagacgcgcttgaacctgatgttcctcggtcagttccgcttacagcctaccattaacaccaacaaagatagcgagattgatgcacataaacaggagtctggtatcgctcctaactttgtacacagccaagacggtagccaccttcgtaagactgtagtgtgggcacacgagaagtacggaatcgaatcttttgcactgattcacgactccttcggtaccattccggctgacgctgcgaacctgttcaaagcagtgcgcgaaactatggttgacacatatgagtcttgtgatgtactggctgatttctacgaccagttcgctgaccagttgcacgagtctcaattggacaaaatgccagcacttccggctaaaggtaacttgaacctccgtgacatcttagagtcggacttcgcgttcgcg

SEQ ID NO: 490 - protein, 890 aa, synthetic construct
  REGION 1..890: note = Variant of RNA polymerase
MHHHHHHMNTINIAKNDFSDIELAAIPFNTLADHYGEGLAREQLALEHESYEMGEARFRKMFERQLKAGEVADNAAAKPLITTLLPKMIARINDWFEEVKAKRGKRPTAFQFLQEIKPEAVAYITIKTTLACLTSADRTTVQAVASAIGRAIEDEARFGRIRDLEAKHFKKNYEEQLNKRVGHVYKKAFMQVVEADMLSKGLLGGEAWSSWHKEDSITVGVRCIEMLIESTGMVSLHRQNAGVVGQDSETIELAPEYAEAIATRAGALAGISPMFQPCVVPPKPWTGITGGGYWANGRRPLALVRTHSKKGLMRYEDVYMPEVYKAINIAQNTAWSINKWVLAVANVITKWKHCPVRDIPAIEREELPMKPEDIDMNPEALTAWKRAKAAVYRRDKARKSRRILLEFMLEQANKFANHKAIWFPYNMDWRGRVYAVSMFNPQGNDMTKGLLTLAKGKPIGKEGYYWLKIHGANCAGVDKVPFPERIKFIEENHENIMACAKSPLENTWWAEQDSPFCFLAFCFEYAGVQHHGLSYNCSLPLAFDGSCSGIQHFSAMLRDEVGGRAVNLLPSETVQDIYGIVAKKVNEILQADAINGTDNEVVTVTDENTGEISEKVKLGTKALAGQWLAYGVTRSVTKRSVMTLAYGSKEFGFRQQVLRHTIQWAIDSGKGLMFTQPNQAAGYMAKLIWESVSVTVVAAVEAMNWLKSAAKLLAAEVKDKKTGEILRKRCAVHWVTPDGFPVWQEYKKPIQTRLNLMFLGQFRLQPTINTNKDSEIDAHKQESGIAPNFVHSQDGSHLRKTVVWAHEKYGIESFALIHDSFGTIPADAANLFKAVRETMVDTYESCDVLADFYDQFADQLHESQLDKMPALPAKGNLNLRDILESDFAFA

SEQ ID NO: 491 - DNA, 2670 bp, synthetic construct
  misc_feature 1..2670: note = Variant of RNA polymerase
  source 1..2670: mol_type = other DNA
atgcaccatcaccatcaccatatgaacacgattaacatcgctaagaacgacttctctgacatcgaactggctgctatcccgttcaacactctggctgaccattacggtgagggcttagctcgcgaacagttggcccttgagcatgagtcttacgagatgggtgaagcacgtttccgcaagatgtttgagcgtcaacttaaagctggtgaggttgcggataacgctgccgccaagcctctcatcactaccctactccctaagatgattgcacgcatcaacgactggtttgaggaagtgaaagctaagcgcggcaagcgcccgacagccttccagttcctgcaagaaatcaagccggaagccgtagcgtacatcaccattaagaccactctggcttgcctaaccagtgcggaccgtacaaccgttcaggctgtagcaagcgcaatcggtcgggccattgaggacgaggctcgcttcggtcgtatccgtgaccttgaagctaagcacttcaagaaaaactatgaggaacaactcaacaagcgcgtagggcacgtctacaagaaagcatttatgcaagttgtcgaggctgacatgctctctaagggtctactcggtggcgaggcgtggtcttcgtggcataaggaagactctattcatgtaggagtacgctgcatcgagatggtgattgagtcaaccggaatggttagcttacaccgccaaaatgctggcgtagtaggtcaagactctgagactatcgaactcgcacctgaatacgctgaggctatcgcaacccgtgcaggtgcgctggctggcatctctccgatgttccaaccttgcgtagttcctcctaagccgtggactggcattactggtggtggctattgggctaacggtcgtcgtcctctggcgctggtgcgtactcacagtaagaaaggtctgatgcgctacgaagacgtttacatgcctgaggtgtacaaagcgattaacattgcgcaaaacaccgcctggtcgatcaacaagtgggtcctggcggtcgccaacgtaatcaccaagtggaagcattgtccggtccgggacatccctgcgattgagcgtgaagaactcccgatgaaaccggaagacatcgacatgaatcctgaggctctcaccgcgtggaaacgtgctaaagctgctgtgtaccgcagagacaaggctcgcaagtctcgtcgtatcctgcttgagttcatgcttgagcaagccaataagtttgctaaccataaggccatctggttcccttacaacatggactggcgcggtcgtgtttacgctgtgtcaatgttcaacccgcaaggtaacgatatgaccaaaggactgcttacgctggcgaaaggtaaaccaatcggtaaggaaggttactactggctgaaaatccacggtgcaaactgtgcgggtgtcgataaggttccgttccctgagcgcatcaagttcattgaggaaaaccacgagaacatcatggcttgcgctaagtctccactggagaacacttggtgggctgagcaagatagtccgttctgcttccttgcgttctgctttgagtacgctggggtacagcaccacggcctgagctataactgctcccttccgctggcgtttgacgggtcttgctctggcatccagcacttctccgcgatgctccgagatgaggtaggtggtcgcgcggttaacttgcttcctagtgaaaccgttcaggacatctacgggattgttgctaagaaagtcaacgagattctacaagcagacgcaatcaatgggaccgataacgaagtagttaccgtgaccgatgagaacactggtgaaatctctgagaaagtcaagctgggcactaaggcactggctggtcaatggctggcttacggtgttactcgcagtgtgactaagcgttcagtcatgacgctggcttacgggtccaaagagttcggcttccgtcaacaagtgctgcgccacactattcagtgggctattgattccggcaagggtctgatgttcactcagccgaatcaggctgctggatacatggctaagctgatttgggaatctgtgagcgtgacggtggtagctgcggttgaagcaatgaactggcttaagtctgctgctaagctgctggctgctgaggtcaaagataagaagactggagagattcttcgcaagcgttgcgctgtgcattgggtaactcctgatggtttccctgtgtggcaggaatacaagaagcctattcagacgcgcttgaacctgatgttcctcggtcagttccgcttacagcctaccattaacaccaacaaagatagcgagattgatgcacataaacaggagtctggtatcgctcctaactttgtacacagccaagacggtagccaccttcgtaagactgtagtgtgggcacacgagaagtacggaatcgaatcttttgcactgattcacgactccttcggtaccattccggctgacgctgcgaacctgttcaaagcagtgcgcgaaactatggttgacacatatgagtcttgtgatgtactggctgatttctacgaccagttcgctgaccagttgcacgagtctcaattggacaaaatgccagcacttccggctaaaggtaacttgaacctccgtgacatcttagagtcggacttcgcgttcgcg

SEQ ID NO: 492 - protein, 890 aa, synthetic construct
  REGION 1..890: note = Variant of RNA polymerase
MHHHHHHMNTINIAKNDFSDIELAAIPFNTLADHYGEGLAREQLALEHESYEMGEARFRKMFERQLKAGEVADNAAAKPLITTLLPKMIARINDWFEEVKAKRGKRPTAFQFLQEIKPEAVAYITIKTTLACLTSADRTTVQAVASAIGRAIEDEARFGRIRDLEAKHFKKNYEEQLNKRVGHVYKKAFMQVVEADMLSKGLLGGEAWSSWHKEDSIHVGVRCIEMVIESTGMVSLHRQNAGVVGQDSETIELAPEYAEAIATRAGALAGISPMFQPCVVPPKPWTGITGGGYWANGRRPLALVRTHSKKGLMRYEDVYMPEVYKAINIAQNTAWSINKWVLAVANVITKWKHCPVRDIPAIEREELPMKPEDIDMNPEALTAWKRAKAAVYRRDKARKSRRILLEFMLEQANKFANHKAIWFPYNMDWRGRVYAVSMFNPQGNDMTKGLLTLAKGKPIGKEGYYWLKIHGANCAGVDKVPFPERIKFIEENHENIMACAKSPLENTWWAEQDSPFCFLAFCFEYAGVQHHGLSYNCSLPLAFDGSCSGIQHFSAMLRDEVGGRAVNLLPSETVQDIYGIVAKKVNEILQADAINGTDNEVVTVTDENTGEISEKVKLGTKALAGQWLAYGVTRSVTKRSVMTLAYGSKEFGFRQQVLRHTIQWAIDSGKGLMFTQPNQAAGYMAKLIWESVSVTVVAAVEAMNWLKSAAKLLAAEVKDKKTGEILRKRCAVHWVTPDGFPVWQEYKKPIQTRLNLMFLGQFRLQPTINTNKDSEIDAHKQESGIAPNFVHSQDGSHLRKTVVWAHEKYGIESFALIHDSFGTIPADAANLFKAVRETMVDTYESCDVLADFYDQFADQLHESQLDKMPALPAKGNLNLRDILESDFAFA

SEQ ID NO: 493 - DNA, 2670 bp, synthetic construct
  misc_feature 1..2670: note = Variant of RNA polymerase
  source 1..2670: mol_type = other DNA
atgcaccatcaccatcaccatatgaacacgattaacatcgctaagaacgacttctctgacatcgaactggctgctatcccgttcaacactctggctgaccattacggtgagggcttagctcgcgaacagttggcccttgagcatgagtcttacgagatgggtgaagcacgtttccgcaagatgtttgagcgtcaacttaaagctggtgaggttgcggataacgctgccgccaagcctctcatcactaccctactccctaagatgattgcacgcatcaacgactggtttgaggaagtgaaagctaagcgcggcaagcgcccgacagccttccagttcctgcaacttatcaagccggaagccgtagcgtacatcaccattaagaccactctggcttgcctaaccagtgcggaccgtacaaccgttcaggctgtagcaagcgcaatcggtcgggccattgaggacgaggctcgcttcggtcgtatccgtgaccttgaagctaagcacttcaagaaaaactatgaggaacaactcaacaagcgcgtagggcacgtctacaagaaagcatttatgcaagttgtcgaggctgacatgctctctaagggtctactcggtggcgaggcgtggtcttcgtggcataaggaagactctattcatgtaggagtacgctgcatcgagatgctcattgagtcaaccggaatggttagcttacaccgccaaaatgctggcgtagtaggtcaagactctgagactatcgaactcgcacctgaatacgctgaggctatcgcaacccgtgcaggtgcgctggctggcatctctccgatgttccaaccttgcgtagttcctcctaagccgtggactggcattactggtggtggctattgggctaacggtcgtcgtcctctggcgctggtgcgtactcacagtaagaaaggtctgatgcgctacgaagacgtttacatgcctgaggtgtacaaagcgattaacattgcgcaaaacaccgcctggtcgatcaacaagtgggtcctggcggtcgccaacgtaatcaccaagtggaagcattgtccggtccgggacatccctgcgattgagcgtgaagaactcccgatgaaaccggaagacatcgacatgaatcctgaggctctcaccgcgtggaaacgtgctaaagctgctgtgtaccgcagagacaaggctcgcaagtctcgtcgtatcctgcttgagttcatgcttgagcaagccaataagtttgctaaccataaggccatctggttcccttacaacatggactggcgcggtcgtgtttacgctgtgtcaatgttcaacccgcaaggtaacgatatgaccaaaggactgcttacgctggcgaaaggtaaaccaatcggtaaggaaggttactactggctgaaaatccacggtgcaaactgtgcgggtgtcgataaggttccgttccctgagcgcatcaagttcattgaggaaaaccacgagaacatcatggcttgcgctaagtctccactggagaacacttggtgggctgagcaagatagtccgttctgcttccttgcgttctgctttgagtacgctggggtacagcaccacggcctgagctataactgctcccttccgctggcgtttgacgggtcttgctctggcatccagcacttctccgcgatgctccgagatgaggtaggtggtcgcgcggttaacttgcttcctagtgaaaccgttcaggacatctacgggattgttgctaagaaagtcaacgagattctacaagcagacgcaatcaatgggaccgataacgaagtagttaccgtgaccgatgagaacactggtgaaatctctgagaaagtcaagctgggcactaaggcactggctggtcaatggctggcttacggtgttactcgcagtgtgactaagcgttcagtcatgacgctggcttacgggtccaaagagttcggcttccgtcaacaagtgctgcgccacactattcagtgggctattgattccggcaagggtctgatgttcactcagccgaatcaggctgctggatacatggctaagctgatttgggaatctgtgagcgtgacggtggtagctgcggttgaagcaatgaactggcttaagtctgctgctaagctgctggctgctgaggtcaaagataagaagactggagagattcttcgcaagcgttgcgctgtgcattgggtaactcctgatggtttccctgtgtggcaggaatacaagaagcctattcagacgcgcttgaacctgatgttcctcggtcagttccgcttacagcctaccattaacaccaacaaagatagcgagattgatgcacataaacaggagtctggtatcgctcctaactttgtacacagccaagacggtagccaccttcgtaagactgtagtgtgggcacacgagaagtacggaatcgaatcttttgcactgattcacgactccttcggtaccattccggctgacgctgcgaacctgttcaaagcagtgcgcgaaactatggttgacacatatgagtcttgtgatgtactggctgatttctacgaccagttcgctgaccagttgcacgagtctcaattggacaaaatgccagcacttccggctaaaggtaacttgaacctccgtgacatcttagagtcggacttcgcgttcgcg

SEQ ID NO: 494 - protein, 890 aa, synthetic construct
  REGION 1..890: note = Variant of RNA polymerase
MHHHHHHMNTINIAKNDFSDIELAAIPFNTLADHYGEGLAREQLALEHESYEMGEARFRKMFERQLKAGEVADNAAAKPLITTLLPKMIARINDWFEEVKAKRGKRPTAFQFLQLIKPEAVAYITIKTTLACLTSADRTTVQAVASAIGRAIEDEARFGRIRDLEAKHFKKNYEEQLNKRVGHVYKKAFMQVVEADMLSKGLLGGEAWSSWHKEDSIHVGVRCIEMLIESTGMVSLHRQNAGVVGQDSETIELAPEYAEAIATRAGALAGISPMFQPCVVPPKPWTGITGGGYWANGRRPLALVRTHSKKGLMRYEDVYMPEVYKAINIAQNTAWSINKWVLAVANVITKWKHCPVRDIPAIEREELPMKPEDIDMNPEALTAWKRAKAAVYRRDKARKSRRILLEFMLEQANKFANHKAIWFPYNMDWRGRVYAVSMFNPQGNDMTKGLLTLAKGKPIGKEGYYWLKIHGANCAGVDKVPFPERIKFIEENHENIMACAKSPLENTWWAEQDSPFCFLAFCFEYAGVQHHGLSYNCSLPLAFDGSCSGIQHFSAMLRDEVGGRAVNLLPSETVQDIYGIVAKKVNEILQADAINGTDNEVVTVTDENTGEISEKVKLGTKALAGQWLAYGVTRSVTKRSVMTLAYGSKEFGFRQQVLRHTIQWAIDSGKGLMFTQPNQAAGYMAKLIWESVSVTVVAAVEAMNWLKSAAKLLAAEVKDKKTGEILRKRCAVHWVTPDGFPVWQEYKKPIQTRLNLMFLGQFRLQPTINTNKDSEIDAHKQESGIAPNFVHSQDGSHLRKTVVWAHEKYGIESFALIHDSFGTIPADAANLFKAVRETMVDTYESCDVLADFYDQFADQLHESQLDKMPALPAKGNLNLRDILESDFAFA

SEQ ID NO: 495 - DNA, 2670 bp, synthetic construct
  misc_feature 1..2670: note = Variant of RNA polymerase
  source 1..2670: mol_type = other DNA
atgcaccatcaccatcaccatatgaacacgattaacatcgctaagaacgacttctctgacatcgaactggctgctatcccgttcaacactctggctgaccattacggtgagggcttagctcgcgaacagttggcccttgagcatgagtcttacgagatgggtgaagcacgtttccgcaagatgtttgagcgtcaacttaaagctggtgaggttgcggataacgctgccgccaagcctctcatcactaccctactccctaagatgattgcacgcatcaacgactggtttgaggaagtgaaagctaagcgcggcaagcgcccgacagccttccagttcctgcaagaaatcaagccggaagccgtagcgtacatcaccattaagaccactctggcttgcctaaccagtgcggaccgtacaaccgttcaggctgtagcaagcgcaatcggtcgggccattgaggacgaggctcgcttcggtcgtatccgtgaccttgaagctaagcacttcaagaaaaactatgaggaacaactcaacaagcgcgtagggcacgtctacaagaaagcatttatgcaagttgtcgaggctgacatgctctctaagggtctactcggtggcgaggcgtggtcttcgtggcataaggaagactctattcatgtaggagtacgctgcatcgagatgctcattgagtcaaccggaatggttagcttacaccgccaaaatgctggcgtagtaggtcaagactctgagactatcgaactcgcacctgaatacgctgaggctatcgcaacccgtgcaggtgcgctggctggcatctctccggggttccaaccttgcgtagttcctcctaagccgtggactggcattactggtggtggctattgggctaacggtcgtcgtcctctggcgctggtgcgtactcacagtaagaaaggtctgatgcgctacgaagacgtttacatgcctgaggtgtacaaagcgattaacattgcgcaaaacaccgcctggtcgatcaacaagtgggtcctggcggtcgccaacgtaatcaccaagtggaagcattgtccggtccgggacatccctgcgattgagcgtgaagaactcccgatgaaaccggaagacatcgacatgaatcctgaggctctcaccgcgtggaaacgtgctaaagctgctgtgtaccgcagagacaaggctcgcaagtctcgtcgtatcctgcttgagttcatgcttgagcaagccaataagtttgctaaccataaggccatctggttcccttacaacatggactggcgcggtcgtgtttacgctgtgtcaatgttcaacccgcaaggtaacgatatgaccaaaggactgcttacgctggcgaaaggtaaaccaatcggtaaggaaggttactactggctgaaaatccacggtgcaaactgtgcgggtgtcgataaggttccgttccctgagcgcatcaagttcattgaggaaaaccacgagaacatcatggcttgcgctaagtctccactggagaacacttggtgggctgagcaagatagtccgttctgcttccttgcgttctgctttgagtacgctggggtacagcaccacggcctgagctataactgctcccttccgctggcgtttgacgggtcttgctctggcatccagcacttctccgcgatgctccgagatgaggtaggtggtcgcgcggttaacttgcttcctagtgaaaccgttcaggacatctacgggattgttgctaagaaagtcaacgagattctacaagcagacgcaatcaatgggaccgataacgaagtagttaccgtgaccgatgagaacactggtgaaatctctgagaaagtcaagctgggcactaaggcactggctggtcaatggctggcttacggtgttactcgcagtgtgactaagcgttcagtcatgacgctggcttacgggtccaaagagttcggcttccgtcaacaagtgctgcgccacactattcagtgggctattgattccggcaagggtctgatgttcactcagccgaatcaggctgctggatacatggctaagctgatttgggaatctgtgagcgtgacggtggtagctgcggttgaagcaatgaactggcttaagtctgctgctaagctgctggctgctgaggtcaaagataagaagactggagagattcttcgcaagcgttgcgctgtgcattgggtaactcctgatggtttccctgtgtggcaggaatacaagaagcctattcagacgcgcttgaacctgatgttcctcggtcagttccgcttacagcctaccattaacaccaacaaagatagcgagattgatgcacataaacaggagtctggtatcgctcctaactttgtacacagccaagacggtagccaccttcgtaagactgtagtgtgggcacacgagaagtacggaatcgaatcttttgcactgattcacgactccttcggtaccattccggctgacgctgcgaacctgttcaaagcagtgcgcgaaactatggttgacacatatgagtcttgtgatgtactggctgatttctacgaccagttcgctgaccagttgcacgagtctcaattggacaaaatgccagcacttccggctaaaggtaacttgaacctccgtgacatcttagagtcggacttcgcgttcgcg

SEQ ID NO: 496 - protein, 890 aa, synthetic construct
  REGION 1..890: note = Variant of RNA polymerase
MHHHHHHMNTINIAKNDFSDIELAAIPFNTLADHYGEGLAREQLALEHESYEMGEARFRKMFERQLKAGEVADNAAAKPLITTLLPKMIARINDWFEEVKAKRGKRPTAFQFLQEIKPEAVAYITIKTTLACLTSADRTTVQAVASAIGRAIEDEARFGRIRDLEAKHFKKNYEEQLNKRVGHVYKKAFMQVVEADMLSKGLLGGEAWSSWHKEDSIHVGVRCIEMLIESTGMVSLHRQNAGVVGQDSETIELAPEYAEAIATRAGALAGISPGFQPCVVPPKPWTGITGGGYWANGRRPLALVRTHSKKGLMRYEDVYMPEVYKAINIAQNTAWSINKWVLAVANVITKWKHCPVRDIPAIEREELPMKPEDIDMNPEALTAWKRAKAAVYRRDKARKSRRILLEFMLEQANKFANHKAIWFPYNMDWRGRVYAVSMFNPQGNDMTKGLLTLAKGKPIGKEGYYWLKIHGANCAGVDKVPFPERIKFIEENHENIMACAKSPLENTWWAEQDSPFCFLAFCFEYAGVQHHGLSYNCSLPLAFDGSCSGIQHFSAMLRDEVGGRAVNLLPSETVQDIYGIVAKKVNEILQADAINGTDNEVVTVTDENTGEISEKVKLGTKALAGQWLAYGVTRSVTKRSVMTLAYGSKEFGFRQQVLRHTIQWAIDSGKGLMFTQPNQAAGYMAKLIWESVSVTVVAAVEAMNWLKSAAKLLAAEVKDKKTGEILRKRCAVHWVTPDGFPVWQEYKKPIQTRLNLMFLGQFRLQPTINTNKDSEIDAHKQESGIAPNFVHSQDGSHLRKTVVWAHEKYGIESFALIHDSFGTIPADAANLFKAVRETMVDTYESCDVLADFYDQFADQLHESQLDKMPALPAKGNLNLRDILESDFAFA

SEQ ID NO: 497 - DNA, 2670 bp, synthetic construct
  misc_feature 1..2670: note = Variant of RNA polymerase
  source 1..2670: mol_type = other DNA
atgcaccatcaccatcaccatatgaacacgattaacatcgctaagaacgacttctctgacatcgaactggctgctatcccgttcaacactctggctgaccattacggtgagggcttagctcgcgaacagttggcccttgagcatgagtcttacgagatgggtgaagcacgtttccgcaagatgtttgagcgtcaacttaaagctggtgaggttgcggataacgctgccgccaagcctctctgtactaccctactccctaagatgattgcacgcatcaacgactggtttgaggaagtgaaagctaagcgcggcaagcgcccgacagccttccagttcctgcaagaaatcaagccggaagccgtagcgtacatcaccattaagaccactctggcttgcctaaccagtgcggaccgtacaaccgttcaggctgtagcaagcgcaatcggtcgggccattgaggacgaggctcgcttcggtcgtatccgtgaccttgaagctaagcacttcaagaaaaactatgaggaacaactcaacaagcgcgtagggcacgtctacaagaaagcatttatgcaagttgtcgaggctgacatgctctctaagggtctactcggtggcgaggcgtggtcttcgtggcataaggaagactctattcatgtaggagtacgctgcatcgagatgctcattgagtcaaccggaatggttagcttacaccgccaaaatgctggcgtagtaggtcaagactctgagactatcgaactcgcacctgaatacgctgaggctatcgcaacccgtgcaggtgcgctggctggcatctctccgatgttccaaccttgcgtagttcctcctaagccgtggactggcattactggtggtggctattgggctaacggtcgtcgtcctctggcgctggtgcgtactcacagtaagaaaggtctgatgcgctacgaagacgtttacatgcctgaggtgtacaaagcgattaacattgcgcaaaacaccgcctggtcgatcaacaagtgggtcctggcggtcgccaacgtaatcaccaagtggaagcattgtccggtccgggacatccctgcgattgagcgtgaagaactcccgatgaaaccggaagacatcgacatgaatcctgaggctctcaccgcgtggaaacgtgctaaagctgctgtgtaccgcagagacaaggctcgcaagtctcgtcgtatcctgcttgagttcatgcttgagcaagccaataagtttgctaaccataaggccatctggttcccttacaacatggactggcgcggtcgtgtttacgctgtgtcaatgttcaacccgcaaggtaacgatatgaccaaaggactgcttacgctggcgaaaggtaaaccaatcggtaaggaaggttactactggctgaaaatccacggtgcaaactgtgcgggtgtcgataaggttccgttccctgagcgcatcaagttcattgaggaaaaccacgagaacatcatggcttgcgctaagtctccactggagaacacttggtgggctgagcaagatagtccgttctgcttccttgcgttctgctttgagtacgctggggtacagcaccacggcctgagctataactgctcccttccgctggcgtttgacgggtcttgctctggcatccagcacttctccgcgatgctccgagatgaggtaggtggtcgcgcggttaacttgcttcctagtgaaaccgttcaggacatctacgggattgttgctaagaaagtcaacgagattctacaagcagacgcaatcaatgggaccgataacgaagtagttaccgtgaccgatgagaacactggtgaaatctctgagaaagtcaagctgggcactaaggcactggctggtcaatggctggcttacggtgttactcgcagtgtgactaagcgttcagtcatgacgctggcttacgggtccaaagagttcggcttccgtcaacaagtgctgcgccacactattcagtgggctattgattccggcaagggtctgatgttcactcagccgaatcaggctgctggatacatggctaagctgatttgggaatctgtgagcgtgacggtggtagctgcggttgaagcaatgaactggcttaagtctgctgctaagctgctggctgctgaggtcaaagataagaagactggagagattcttcgcaagcgttgcgctgtgcattgggtaactcctgatggtttccctgtgtggcaggaatacaagaagcctattcagacgcgcttgaacctgatgttcctcggtcagttccgcttacagcctaccattaacaccaacaaagatagcgagattgatgcacataaacaggagtctggtatcgctcctaactttgtacacagccaagacggtagccaccttcgtaagactgtagtgtgggcacacgagaagtacggaatcgaatcttttgcactgattcacgactccttcggtaccattccggctgacgctgcgaacctgttcaaagcagtgcgcgaaactatggttgacacatatgagtcttgtgatgtactggctgatttctacgaccagttcgctgaccagttgcacgagtctcaattggacaaaatgccagcacttccggctaaaggtaacttgaacctccgtgacatcttagagtcggacttcgcgttcgcg

SEQ ID NO: 498 - protein, 890 aa, synthetic construct
  REGION 1..890: note = Variant of RNA polymerase
MHHHHHHMNTINIAKNDFSDIELAAIPFNTLADHYGEGLAREQLALEHESYEMGEARFRKMFERQLKAGEVADNAAAKPLCTTLLPKMIARINDWFEEVKAKRGKRPTAFQFLQEIKPEAVAYITIKTTLACLTSADRTTVQAVASAIGRAIEDEARFGRIRDLEAKHFKKNYEEQLNKRVGHVYKKAFMQVVEADMLSKGLLGGEAWSSWHKEDSIHVGVRCIEMLIESTGMVSLHRQNAGVVGQDSETIELAPEYAEAIATRAGALAGISPMFQPCVVPPKPWTGITGGGYWANGRRPLALVRTHSKKGLMRYEDVYMPEVYKAINIAQNTAWSINKWVLAVANVITKWKHCPVRDIPAIEREELPMKPEDIDMNPEALTAWKRAKAAVYRRDKARKSRRILLEFMLEQANKFANHKAIWFPYNMDWRGRVYAVSMFNPQGNDMTKGLLTLAKGKPIGKEGYYWLKIHGANCAGVDKVPFPERIKFIEENHENIMACAKSPLENTWWAEQDSPFCFLAFCFEYAGVQHHGLSYNCSLPLAFDGSCSGIQHFSAMLRDEVGGRAVNLLPSETVQDIYGIVAKKVNEILQADAINGTDNEVVTVTDENTGEISEKVKLGTKALAGQWLAYGVTRSVTKRSVMTLAYGSKEFGFRQQVLRHTIQWAIDSGKGLMFTQPNQAAGYMAKLIWESVSVTVVAAVEAMNWLKSAAKLLAAEVKDKKTGEILRKRCAVHWVTPDGFPVWQEYKKPIQTRLNLMFLGQFRLQPTINTNKDSEIDAHKQESGIAPNFVHSQDGSHLRKTVVWAHEKYGIESFALIHDSFGTIPADAANLFKAVRETMVDTYESCDVLADFYDQFADQLHESQLDKMPALPAKGNLNLRDILESDFAFA

SEQ ID NO: 499 - DNA, 2670 bp, synthetic construct
  misc_feature 1..2670: note = Variant of RNA polymerase
  source 1..2670: mol_type = other DNA
atgcaccatcaccatcaccatatgaacacgattaacatcgctaagaacgacttctctgacatcgaactggctgctatcccgttcaacactctggctgaccattacggtgagggcttagctcgcgaacagttggcccttgagcatgagtcttacgagatgggtgaagcacgtttccgcaagatgtttgagcgtcaacttaaagctggtgaggttgcggataacgctgccgccaagcctctcatcactaccctactccctaagatgattgcacgcatcaacgactggtttgaggaagtgaaagctaagcgcggcaagcgcccgacagccttccagttcctgcaagaaatcaagccggaagccgtaatttacatcaccattaagaccactctggcttgcctaaccagtgcggaccgtacaaccgttcaggctgtagcaagcgcaatcggtcgggccattgaggacgaggctcgcttcggtcgtatccgtgaccttgaagctaagcacttcaagaaaaactatgaggaacaactcaacaagcgcgtagggcacgtctacaagaaagcatttatgcaagttgtcgaggctgacatgctctctaagggtctactcggtggcgaggcgtggtcttcgtggcataaggaagactctattcatgtaggagtacgctgcatcgagatgctcattgagtcaaccggaatggttagcttacaccgccaaaatgctggcgtagtaggtcaagactctgagactatcgaactcgcacctgaatacgctgaggctatcgcaacccgtgcaggtgcgctggctggcatctctccgatgttccaaccttgcgtagttcctcctaagccgtggactggcattactggtggtggctattgggctaacggtcgtcgtcctctggcgctggtgcgtactcacagtaagaaaggtctgatgcgctacgaagacgtttacatgcctgaggtgtacaaagcgattaacattgcgcaaaacaccgcctggtcgatcaacaagtgggtcctggcggtcgccaacgtaatcaccaagtggaagcattgtccggtccgggacatccctgcgattgagcgtgaagaactcccgatgaaaccggaagacatcgacatgaatcctgaggctctcaccgcgtggaaacgtgctaaagctgctgtgtaccgcagagacaaggctcgcaagtctcgtcgtatcctgcttgagttcatgcttgagcaagccaataagtttgctaaccataaggccatctggttcccttacaacatggactggcgcggtcgtgtttacgctgtgtcaatgttcaacccgcaaggtaacgatatgaccaaaggactgcttacgctggcgaaaggtaaaccaatcggtaaggaaggttactactggctgaaaatccacggtgcaaactgtgcgggtgtcgataaggttccgttccctgagcgcatcaagttcattgaggaaaaccacgagaacatcatggcttgcgctaagtctccactggagaacacttggtgggctgagcaagatagtccgttctgcttccttgcgttctgctttgagtacgctggggtacagcaccacggcctgagctataactgctcccttccgctggcgtttgacgggtcttgctctggcatccagcacttctccgcgatgctccgagatgaggtaggtggtcgcgcggttaacttgcttcctagtgaaaccgttcaggacatctacgggattgttgctaagaaagtcaacgagattctacaagcagacgcaatcaatgggaccgataacgaagtagttaccgtgaccgatgagaacactggtgaaatctctgagaaagtcaagctgggcactaaggcactggctggtcaatggctggcttacggtgttactcgcagtgtgactaagcgttcagtcatgacgctggcttacgggtccaaagagttcggcttccgtcaacaagtgctgcgccacactattcagtgggctattgattccggcaagggtctgatgttcactcagccgaatcaggctgctggatacatggctaagctgatttgggaatctgtgagcgtgacggtggtagctgcggttgaagcaatgaactggcttaagtctgctgctaagctgctggctgctgaggtcaaagataagaagactggagagattcttcgcaagcgttgcgctgtgcattgggtaactcctgatggtttccctgtgtggcaggaatacaagaagcctattcagacgcgcttgaacctgatgttcctcggtcagttccgcttacagcctaccattaacaccaacaaagatagcgagattgatgcacataaacaggagtctggtatcgctcctaactttgtacacagccaagacggtagccaccttcgtaagactgtagtgtgggcacacgagaagtacggaatcgaatcttttgcactgattcacgactccttcggtaccattccggctgacgctgcgaacctgttcaaagcagtgcgcgaaactatggttgacacatatgagtcttgtgatgtactggctgatttctacgaccagttcgctgaccagttgcacgagtctcaattggacaaaatgccagcacttccggctaaaggtaacttgaacctccgtgacatcttagagtcggacttcgcgttcgcg

SEQ ID NO: 500 - protein, 890 aa, synthetic construct
  REGION 1..890: note = Variant of RNA polymerase
MHHHHHHMNTINIAKNDFSDIELAAIPFNTLADHYGEGLAREQLALEHESYEMGEARFRKMFERQLKAGEVADNAAAKPLITTLLPKMIARINDWFEEVKAKRGKRPTAFQFLQEIKPEAVIYITIKTTLACLTSADRTTVQAVASAIGRAIEDEARFGRIRDLEAKHFKKNYEEQLNKRVGHVYKKAFMQVVEADMLSKGLLGGEAWSSWHKEDSIHVGVRCIEMLIESTGMVSLHRQNAGVVGQDSETIELAPEYAEAIATRAGALAGISPMFQPCVVPPKPWTGITGGGYWANGRRPLALVRTHSKKGLMRYEDVYMPEVYKAINIAQNTAWSINKWVLAVANVITKWKHCPVRDIPAIEREELPMKPEDIDMNPEALTAWKRAKAAVYRRDKARKSRRILLEFMLEQANKFANHKAIWFPYNMDWRGRVYAVSMFNPQGNDMTKGLLTLAKGKPIGKEGYYWLKIHGANCAGVDKVPFPERIKFIEENHENIMACAKSPLENTWWAEQDSPFCFLAFCFEYAGVQHHGLSYNCSLPLAFDGSCSGIQHFSAMLRDEVGGRAVNLLPSETVQDIYGIVAKKVNEILQADAINGTDNEVVTVTDENTGEISEKVKLGTKALAGQWLAYGVTRSVTKRSVMTLAYGSKEFGFRQQVLRHTIQWAIDSGKGLMFTQPNQAAGYMAKLIWESVSVTVVAAVEAMNWLKSAAKLLAAEVKDKKTGEILRKRCAVHWVTPDGFPVWQEYKKPIQTRLNLMFLGQFRLQPTINTNKDSEIDAHKQESGIAPNFVHSQDGSHLRKTVVWAHEKYGIESFALIHDSFGTIPADAANLFKAVRETMVDTYESCDVLADFYDQFADQLHESQLDKMPALPAKGNLNLRDILESDFAFA

SEQ ID NO: 501 - DNA, 2670 bp, synthetic construct
  misc_feature 1..2670: note = Variant of RNA polymerase
  source 1..2670: mol_type = other DNA
atgcaccatcaccatcaccatatgaacacgattaacatcgctaagaacgacttctctgacatcgaactggctgctatcccgttcaacactctggctgaccattacggtgagggcttagctcgcgaacagttggcccttgagcatgagtcttacgagatgggtgaagcacgtttccgcaagtattttgagcgtcaacttaaagctggtgaggttgcggataacgctgccgccaagcctctcatcactaccctactccctaagatgattgcacgcatcaacgactggtttgaggaagtgaaagctaagcgcggcaagcgcccgacagccttccagttcctgcaagaaatcaagccggaagccgtagcgtacatcaccattaagaccactctggcttgcctaaccagtgcggaccgtacaaccgttcaggctgtagcaagcgcaatcggtcgggccattgaggacgaggctcgcttcggtcgtatccgtgaccttgaagctaagcacttcaagaaaaactatgaggaacaactcaacaagcgcgtagggcacgtctacaagaaagcatttatgcaagttgtcgaggctgacatgctctctaagggtctactcggtggcgaggcgtggtcttcgtggcataaggaagactctattcatgtaggagtacgctgcatcgagatgctcattgagtcaaccggaatggttagcttacaccgccaaaatgctggcgtagtaggtcaagactctgagactatcgaactcgcacctgaatacgctgaggctatcgcaacccgtgcaggtgcgctggctggcatctctccgatgttccaaccttgcgtagttcctcctaagccgtggactggcattactggtggtggctattgggctaacggtcgtcgtcctctggcgctggtgcgtactcacagtaagaaaggtctgatgcgctacgaagacgtttacatgcctgaggtgtacaaagcgattaacattgcgcaaaacaccgcctggtcgatcaacaagtgggtcctggcggtcgccaacgtaatcaccaagtggaagcattgtccggtccgggacatccctgcgattgagcgtgaagaactcccgatgaaaccggaagacatcgacatgaatcctgaggctctcaccgcgtggaaacgtgctaaagctgctgtgtaccgcagagacaaggctcgcaagtctcgtcgtatcctgcttgagttcatgcttgagcaagccaataagtttgctaaccataaggccatctggttcccttacaacatggactggcgcggtcgtgtttacgctgtgtcaatgttcaacccgcaaggtaacgatatgaccaaaggactgcttacgctggcgaaaggtaaaccaatcggtaaggaaggttactactggctgaaaatccacggtgcaaactgtgcgggtgtcgataaggttccgttccctgagcgcatcaagttcattgaggaaaaccacgagaacatcatggcttgcgctaagtctccactggagaacacttggtgggctgagcaagatagtccgttctgcttccttgcgttctgctttgagtacgctggggtacagcaccacggcctgagctataactgctcccttccgctggcgtttgacgggtcttgctctggcatccagcacttctccgcgatgctccgagatgaggtaggtggtcgcgcggttaacttgcttcctagtgaaaccgttcaggacatctacgggattgttgctaagaaagtcaacgagattctacaagcagacgcaatcaatgggaccgataacgaagtagttaccgtgaccgatgagaacactggtgaaatctctgagaaagtcaagctgggcactaaggcactggctggtcaatggctggcttacggtgttactcgcagtgtgactaagcgttcagtcatgacgctggcttacgggtccaaagagttcggcttccgtcaacaagtgctgcgccacactattcagtgggctattgattccggcaagggtctgatgttcactcagccgaatcaggctgctggatacatggctaagctgatttgggaatctgtgagcgtgacggtggtagctgcggttgaagcaatgaactggcttaagtctgctgctaagctgctggctgctgaggtcaaagataagaagactggagagattcttcgcaagcgttgcgctgtgcattgggtaactcctgatggtttccctgtgtggcaggaatacaagaagcctattcagacgcgcttgaacctgatgttcctcggtcagttccgcttacagcctaccattaacaccaacaaagatagcgagattgatgcacataaacaggagtctggtatcgctcctaactttgtacacagccaagacggtagccaccttcgtaagactgtagtgtgggcacacgagaagtacggaatcgaatcttttgcactgattcacgactccttcggtaccattccggctgacgctgcgaacctgttcaaagcagtgcgcgaaactatggttgacacatatgagtcttgtgatgtactggctgatttctacgaccagttcgctgaccagttgcacgagtctcaattggacaaaatgccagcacttccggctaaaggtaacttgaacctccgtgacatcttagagtcggacttcgcgttcgcg

SEQ ID NO: 502 - protein, 890 aa, synthetic construct
  REGION 1..890: note = Variant of RNA polymerase
MHHHHHHMNTINIAKNDFSDIELAAIPFNTLADHYGEGLAREQLALEHESYEMGEARFRKYFERQLKAGEVADNAAAKPLITTLLPKMIARINDWFEEVKAKRGKRPTAFQFLQEIKPEAVAYITIKTTLACLTSADRTTVQAVASAIGRAIEDEARFGRIRDLEAKHFKKNYEEQLNKRVGHVYKKAFMQVVEADMLSKGLLGGEAWSSWHKEDSIHVGVRCIEMLIESTGMVSLHRQNAGVVGQDSETIELAPEYAEAIATRAGALAGISPMFQPCVVPPKPWTGITGGGYWANGRRPLALVRTHSKKGLMRYEDVYMPEVYKAINIAQNTAWSINKWVLAVANVITKWKHCPVRDIPAIEREELPMKPEDIDMNPEALTAWKRAKAAVYRRDKARKSRRILLEFMLEQANKFANHKAIWFPYNMDWRGRVYAVSMFNPQGNDMTKGLLTLAKGKPIGKEGYYWLKIHGANCAGVDKVPFPERIKFIEENHENIMACAKSPLENTWWAEQDSPFCFLAFCFEYAGVQHHGLSYNCSLPLAFDGSCSGIQHFSAMLRDEVGGRAVNLLPSETVQDIYGIVAKKVNEILQADAINGTDNEVVTVTDENTGEISEKVKLGTKALAGQWLAYGVTRSVTKRSVMTLAYGSKEFGFRQQVLRHTIQWAIDSGKGLMFTQPNQAAGYMAKLIWESVSVTVVAAVEAMNWLKSAAKLLAAEVKDKKTGEILRKRCAVHWVTPDGFPVWQEYKKPIQTRLNLMFLGQFRLQPTINTNKDSEIDAHKQESGIAPNFVHSQDGSHLRKTVVWAHEKYGIESFALIHDSFGTIPADAANLFKAVRETMVDTYESCDVLADFYDQFADQLHESQLDKMPALPAKGNLNLRDILESDFAFA

SEQ ID NO: 503 - DNA, 2670 bp, synthetic construct
  misc_feature 1..2670: note = Variant of RNA polymerase
  source 1..2670: mol_type = other DNA
atgcaccatcaccatcaccatatgaacacgattaacatcgctaagaacgacttctctgacatcgaactggctgctatcccgttcaacactctgtctgaccattacggtgagggcttagctcgcgaacagttggcccttgagcatgagtcttacgagatgggtgaagcacgtttccgcaagatgtttgagcgtcaacttaaagctggtgaggttgcggataacgctgccgccaagcctctcatcactaccctactccctaagatgattgcacgcatcaacgactggtttgaggaagtgaaagctaagcgcggcaagcgcccgacagccttccagttcctgcaagaaatcaagccggaagccgtagcgtacatcaccattaagaccactctggcttgcctaaccagtgcggaccgtacaaccgttcaggctgtagcaagcgcaatcggtcgggccattgaggacgaggctcgcttcggtcgtatccgtgaccttgaagctaagcacttcaagaaaaactatgaggaacaactcaacaagcgcgtagggcacgtctacaagaaagcatttatgcaagttgtcgaggctgacatgctctctaagggtctactcggtggcgaggcgtggtcttcgtggcataaggaagactctattcatgtaggagtacgctgcatcgagatgctcattgagtcaaccggaatggttagcttacaccgccaaaatgctggcgtagtaggtcaagactctgagactatcgaactcgcacctgaatacgctgaggctatcgcaacccgtgcaggtgcgctggctggcatctctccgatgttccaaccttgcgtagttcctcctaagccgtggactggcattactggtggtggctattgggctaacggtcgtcgtcctctggcgctggtgcgtactcacagtaagaaaggtctgatgcgctacgaagacgtttacatgcctgaggtgtacaaagcgattaacattgcgcaaaacaccgcctggtcgatcaacaagtgggtcctggcggtcgccaacgtaatcaccaagtggaagcattgtccggtccgggacatccctgcgattgagcgtgaagaactcccgatgaaaccggaagacatcgacatgaatcctgaggctctcaccgcgtggaaacgtgctaaagctgctgtgtaccgcagagacaaggctcgcaagtctcgtcgtatcctgcttgagttcatgcttgagcaagccaataagtttgctaaccataaggccatctggttcccttacaacatggactggcgcggtcgtgtttacgctgtgtcaatgttcaacccgcaaggtaacgatatgaccaaaggactgcttacgctggcgaaaggtaaaccaatcggtaaggaaggttactactggctgaaaatccacggtgcaaactgtgcgggtgtcgataaggttccgttccctgagcgcatcaagttcattgaggaaaaccacgagaacatcatggcttgcgctaagtctccactggagaacacttggtgggctgagcaagatagtccgttctgcttccttgcgttctgctttgagtacgctggggtacagcaccacggcctgagctataactgctcccttccgctggcgtttgacgggtcttgctctggcatccagcacttctccgcgatgctccgagatgaggtaggtggtcgcgcggttaacttgcttcctagtgaaaccgttcaggacatctacgggattgttgctaagaaagtcaacgagattctacaagcagacgcaatcaatgggaccgataacgaagtagttaccgtgaccgatgagaacactggtgaaatctctgagaaagtcaagctgggcactaaggcactggctggtcaatggctggcttacggtgttactcgcagtgtgactaagcgttcagtcatgacgctggcttacgggtccaaagagttcggcttccgtcaacaagtgctgcgccacactattcagtgggctattgattccggcaagggtctgatgttcactcagccgaatcaggctgctggatacatggctaagctgatttgggaatctgtgagcgtgacggtggtagctgcggttgaagcaatgaactggcttaagtctgctgctaagctgctggctgctgaggtcaaagataagaagactggagagattcttcgcaagcgttgcgctgtgcattgggtaactcctgatggtttccctgtgtggcaggaatacaagaagcctattcagacgcgcttgaacctgatgttcctcggtcagttccgcttacagcctaccattaacaccaacaaagatagcgagattgatgcacataaacaggagtctggtatcgctcctaactttgtacacagccaagacggtagccaccttcgtaagactgtagtgtgggcacacgagaagtacggaatcgaatcttttgcactgattcacgactccttcggtaccattccggctgacgctgcgaacctgttcaaagcagtgcgcgaaactatggttgacacatatgagtcttgtgatgtactggctgatttctacgaccagttcgctgaccagttgcacgagtctcaattggacaaaatgccagcacttccggctaaaggtaacttgaacctccgtgacatcttagagtcggacttcgcgttcgcg

SEQ ID NO: 504 - protein, 890 aa, synthetic construct
  REGION 1..890: note = Variant of RNA polymerase
MHHHHHHMNTINIAKNDFSDIELAAIPFNTLSDHYGEGLAREQLALEHESYEMGEARFRKMFERQLKAGEVADNAAAKPLITTLLPKMIARINDWFEEVKAKRGKRPTAFQFLQEIKPEAVAYITIKTTLACLTSADRTTVQAVASAIGRAIEDEARFGRIRDLEAKHFKKNYEEQLNKRVGHVYKKAFMQVVEADMLSKGLLGGEAWSSWHKEDSIHVGVRCIEMLIESTGMVSLHRQNAGVVGQDSETIELAPEYAEAIATRAGALAGISPMFQPCVVPPKPWTGITGGGYWANGRRPLALVRTHSKKGLMRYEDVYMPEVYKAINIAQNTAWSINKWVLAVANVITKWKHCPVRDIPAIEREELPMKPEDIDMNPEALTAWKRAKAAVYRRDKARKSRRILLEFMLEQANKFANHKAIWFPYNMDWRGRVYAVSMFNPQGNDMTKGLLTLAKGKPIGKEGYYWLKIHGANCAGVDKVPFPERIKFIEENHENIMACAKSPLENTWWAEQDSPFCFLAFCFEYAGVQHHGLSYNCSLPLAFDGSCSGIQHFSAMLRDEVGGRAVNLLPSETVQDIYGIVAKKVNEILQADAINGTDNEVVTVTDENTGEISEKVKLGTKALAGQWLAYGVTRSVTKRSVMTLAYGSKEFGFRQQVLRHTIQWAIDSGKGLMFTQPNQAAGYMAKLIWESVSVTVVAAVEAMNWLKSAAKLLAAEVKDKKTGEILRKRCAVHWVTPDGFPVWQEYKKPIQTRLNLMFLGQFRLQPTINTNKDSEIDAHKQESGIAPNFVHSQDGSHLRKTVVWAHEKYGIESFALIHDSFGTIPADAANLFKAVRETMVDTYESCDVLADFYDQFADQLHESQLDKMPALPAKGNLNLRDILESDFAFA

SEQ ID NO: 505 - DNA, 2670 bp, synthetic construct
  misc_feature 1..2670: note = Variant of RNA polymerase
  source 1..2670: mol_type = other DNA
atgcaccatcaccatcaccatatgaacacgattaacatcgctaagaacgacttctctgacatcgaactggctgctatcccgttcaacactctggctgaccattacggtgagggcttagctcgcgaacagttggcccttgagcatgagtcttacgagatgggtgaagcacgtttccgcaagatgtttgagcgtcaacttaaagctggtgaggttgcggataacgctgccgccaagcctctcatcactaccctactccctaagatgattgcacgcatcaacgactggtttgaggaagtgaaagctaagcgcggcaagcgcccgacagccttccagttcctgcaagaaatcaagccggaagccgtagcgtacatcaccattaagaccactctggcttgcctaaccagtgcggaccgtaggaccgttcaggctgtagcaagcgcaatcggtcgggccattgaggacgaggctcgcttcggtcgtatccgtgaccttgaagctaagcacttcaagaaaaactatgaggaacaactcaacaagcgcgtagggcacgtctacaagaaagcatttatgcaagttgtcgaggctgacatgctctctaagggtctactcggtggcgaggcgtggtcttcgtggcataaggaagactctattcatgtaggagtacgctgcatcgagatgctcattgagtcaaccggaatggttagcttacaccgccaaaatgctggcgtagtaggtcaagactctgagactatcgaactcgcacctgaatacgctgaggctatcgcaacccgtgcaggtgcgctggctggcatctctccgatgttccaaccttgcgtagttcctcctaagccgtggactggcattactggtggtggctattgggctaacggtcgtcgtcctctggcgctggtgcgtactcacagtaagaaaggtctgatgcgctacgaagacgtttacatgcctgaggtgtacaaagcgattaacattgcgcaaaacaccgcctggtcgatcaacaagtgggtcctggcggtcgccaacgtaatcaccaagtggaagcattgtccggtccgggacatccctgcgattgagcgtgaagaactcccgatgaaaccggaagacatcgacatgaatcctgaggctctcaccgcgtggaaacgtgctaaagctgctgtgtaccgcagagacaaggctcgcaagtctcgtcgtatcctgcttgagttcatgcttgagcaagccaataagtttgctaaccataaggccatctggttcccttacaacatggactggcgcggtcgtgtttacgctgtgtcaatgttcaacccgcaaggtaacgatatgaccaaaggactgcttacgctggcgaaaggtaaaccaatcggtaaggaaggttactactggctgaaaatccacggtgcaaactgtgcgggtgtcgataaggttccgttccctgagcgcatcaagttcattgaggaaaaccacgagaacatcatggcttgcgctaagtctccactggagaacacttggtgggctgagcaagatagtccgttctgcttccttgcgttctgctttgagtacgctggggtacagcaccacggcctgagctataactgctcccttccgctggcgtttgacgggtcttgctctggcatccagcacttctccgcgatgctccgagatgaggtaggtggtcgcgcggttaacttgcttcctagtgaaaccgttcaggacatctacgggattgttgctaagaaagtcaacgagattctacaagcagacgcaatcaatgggaccgataacgaagtagttaccgtgaccgatgagaacactggtgaaatctctgagaaagtcaagctgggcactaaggcactggctggtcaatggctggcttacggtgttactcgcagtgtgactaagcgttcagtcatgacgctggcttacgggtccaaagagttcggcttccgtcaacaagtgctgcgccacactattcagtgggctattgattccggcaagggtctgatgttcactcagccgaatcaggctgctggatacatggctaagctgatttgggaatctgtgagcgtgacggtggtagctgcggttgaagcaatgaactggcttaagtctgctgctaagctgctggctgctgaggtcaaagataagaagactggagagattcttcgcaagcgttgcgctgtgcattgggtaactcctgatggtttccctgtgtggcaggaatacaagaagcctattcagacgcgcttgaacctgatgttcctcggtcagttccgcttacagcctaccattaacaccaacaaagatagcgagattgatgcacataaacaggagtctggtatcgctcctaactttgtacacagccaagacggtagccaccttcgtaagactgtagtgtgggcacacgagaagtacggaatcgaatcttttgcactgattcacgactccttcggtaccattccggctgacgctgcgaacctgttcaaagcagtgcgcgaaactatggttgacacatatgagtcttgtgatgtactggctgatttctacgaccagttcgctgaccagttgcacgagtctcaattggacaaaatgccagcacttccggctaaaggtaacttgaacctccgtgacatcttagagtcggacttcgcgttcgcg

SEQ ID NO: 506 - protein, 890 aa, synthetic construct
  REGION 1..890: note = Variant of RNA polymerase
MHHHHHHMNTINIAKNDFSDIELAAIPFNTLADHYGEGLAREQLALEHESYEMGEARFRKMFERQLKAGEVADNAAAKPLITTLLPKMIARINDWFEEVKAKRGKRPTAFQFLQEIKPEAVAYITIKTTLACLTSADRRTVQAVASAIGRAIEDEARFGRIRDLEAKHFKKNYEEQLNKRVGHVYKKAFMQVVEADMLSKGLLGGEAWSSWHKEDSIHVGVRCIEMLIESTGMVSLHRQNAGVVGQDSETIELAPEYAEAIATRAGALAGISPMFQPCVVPPKPWTGITGGGYWANGRRPLALVRTHSKKGLMRYEDVYMPEVYKAINIAQNTAWSINKWVLAVANVITKWKHCPVRDIPAIEREELPMKPEDIDMNPEALTAWKRAKAAVYRRDKARKSRRILLEFMLEQANKFANHKAIWFPYNMDWRGRVYAVSMFNPQGNDMTKGLLTLAKGKPIGKEGYYWLKIHGANCAGVDKVPFPERIKFIEENHENIMACAKSPLENTWWAEQDSPFCFLAFCFEYAGVQHHGLSYNCSLPLAFDGSCSGIQHFSAMLRDEVGGRAVNLLPSETVQDIYGIVAKKVNEILQADAINGTDNEVVTVTDENTGEISEKVKLGTKALAGQWLAYGVTRSVTKRSVMTLAYGSKEFGFRQQVLRHTIQWAIDSGKGLMFTQPNQAAGYMAKLIWESVSVTVVAAVEAMNWLKSAAKLLAAEVKDKKTGEILRKRCAVHWVTPDGFPVWQEYKKPIQTRLNLMFLGQFRLQPTINTNKDSEIDAHKQESGIAPNFVHSQDGSHLRKTVVWAHEKYGIESFALIHDSFGTIPADAANLFKAVRETMVDTYESCDVLADFYDQFADQLHESQLDKMPALPAKGNLNLRDILESDFAFA

SEQ ID NO: 507 - DNA, 2670 bp, synthetic construct
  misc_feature 1..2670: note = Variant of RNA polymerase
  source 1..2670: mol_type = other DNA
atgcaccatcaccatcaccatatgaacacgattaacatcgctaagaacgacttctctgacatcgaactggctgctatcccgttcaacactctggctgaccattacggtgagggcttagctcgcgaacagttggcccttgagcatgagtcttacgagatgggtgaagcacgtttccgcaagatgtttgagcgtcaacttaaagctggtgaggttgcggataactatgccgccaagcctctcatcactaccctactccctaagatgattgcacgcatcaacgactggtttgaggaagtgaaagctaagcgcggcaagcgcccgacagccttccagttcctgcaagaaatcaagccggaagccgtagcgtacatcaccattaagaccactctggcttgcctaaccagtgcggaccgtacaaccgttcaggctgtagcaagcgcaatcggtcgggccattgaggacgaggctcgcttcggtcgtatccgtgaccttgaagctaagcacttcaagaaaaactatgaggaacaactcaacaagcgcgtagggcacgtctacaagaaagcatttatgcaagttgtcgaggctgacatgctctctaagggtctactcggtggcgaggcgtggtcttcgtggcataaggaagactctattcatgtaggagtacgctgcatcgagatgctcattgagtcaaccggaatggttagcttacaccgccaaaatgctggcgtagtaggtcaagactctgagactatcgaactcgcacctgaatacgctgaggctatcgcaacccgtgcaggtgcgctggctggcatctctccgatgttccaaccttgcgtagttcctcctaagccgtggactggcattactggtggtggctattgggctaacggtcgtcgtcctctggcgctggtgcgtactcacagtaagaaaggtctgatgcgctacgaagacgtttacatgcctgaggtgtacaaagcgattaacattgcgcaaaacaccgcctggtcgatcaacaagtgggtcctggcggtcgccaacgtaatcaccaagtggaagcattgtccggtccgggacatccctgcgattgagcgtgaagaactcccgatgaaaccggaagacatcgacatgaatcctgaggctctcaccgcgtggaaacgtgctaaagctgctgtgtaccgcagagacaaggctcgcaagtctcgtcgtatcctgcttgagttcatgcttgagcaagccaataagtttgctaaccataaggccatctggttcccttacaacatggactggcgcggtcgtgtttacgctgtgtcaatgttcaacccgcaaggtaacgatatgaccaaaggactgcttacgctggcgaaaggtaaaccaatcggtaaggaaggttactactggctgaaaatccacggtgcaaactgtgcgggtgtcgataaggttccgttccctgagcgcatcaagttcattgaggaaaaccacgagaacatcatggcttgcgctaagtctccactggagaacacttggtgggctgagcaagatagtccgttctgcttccttgcgttctgctttgagtacgctggggtacagcaccacggcctgagctataactgctcccttccgctggcgtttgacgggtcttgctctggcatccagcacttctccgcgatgctccgagatgaggtaggtggtcgcgcggttaacttgcttcctagtgaaaccgttcaggacatctacgggattgttgctaagaaagtcaacgagattctacaagcagacgcaatcaatgggaccgataacgaagtagttaccgtgaccgatgagaacactggtgaaatctctgagaaagtcaagctgggcactaaggcactggctggtcaatggctggcttacggtgttactcgcagtgtgactaagcgttcagtcatgacgctggcttacgggtccaaagagttcggcttccgtcaacaagtgctgcgccacactattcagtgggctattgattccggcaagggtctgatgttcactcagccgaatcaggctgctggatacatggctaagctgatttgggaatctgtgagcgtgacggtggtagctgcggttgaagcaatgaactggcttaagtctgctgctaagctgctggctgctgaggtcaaagataagaagactggagagattcttcgcaagcgttgcgctgtgcattgggtaactcctgatggtttccctgtgtggcaggaatacaagaagcctattcagacgcgcttgaacctgatgttcctcggtcagttccgcttacagcctaccattaacaccaacaaagatagcgagattgatgcacataaacaggagtctggtatcgctcctaactttgtacacagccaagacggtagccaccttcgtaagactgtagtgtgggcacacgagaagtacggaatcgaatcttttgcactgattcacgactccttcggtaccattccggctgacgctgcgaacctgttcaaagcagtgcgcgaaactatggttgacacatatgagtcttgtgatgtactggctgatttctacgaccagttcgctgaccagttgcacgagtctcaattggacaaaatgccagcacttccggctaaaggtaacttgaacctccgtgacatcttagagtcggacttcgcgttcgcg

SEQ ID NO: 508 - protein, 890 aa, synthetic construct
  REGION 1..890: note = Variant of RNA polymerase
MHHHHHHMNTINIAKNDFSDIELAAIPFNTLADHYGEGLAREQLALEHESYEMGEARFRKMFERQLKAGEVADNYAAKPLITTLLPKMIARINDWFEEVKAKRGKRPTAFQFLQEIKPEAVAYITIKTTLACLTSADRTTVQAVASAIGRAIEDEARFGRIRDLEAKHFKKNYEEQLNKRVGHVYKKAFMQVVEADMLSKGLLGGEAWSSWHKEDSIHVGVRCIEMLIESTGMVSLHRQNAGVVGQDSETIELAPEYAEAIATRAGALAGISPMFQPCVVPPKPWTGITGGGYWANGRRPLALVRTHSKKGLMRYEDVYMPEVYKAINIAQNTAWSINKWVLAVANVITKWKHCPVRDIPAIEREELPMKPEDIDMNPEALTAWKRAKAAVYRRDKARKSRRILLEFMLEQANKFANHKAIWFPYNMDWRGRVYAVSMFNPQGNDMTKGLLTLAKGKPIGKEGYYWLKIHGANCAGVDKVPFPERIKFIEENHENIMACAKSPLENTWWAEQDSPFCFLAFCFEYAGVQHHGLSYNCSLPLAFDGSCSGIQHFSAMLRDEVGGRAVNLLPSETVQDIYGIVAKKVNEILQADAINGTDNEVVTVTDENTGEISEKVKLGTKALAGQWLAYGVTRSVTKRSVMTLAYGSKEFGFRQQVLRHTIQWAIDSGKGLMFTQPNQAAGYMAKLIWESVSVTVVAAVEAMNWLKSAAKLLAAEVKDKKTGEILRKRCAVHWVTPDGFPVWQEYKKPIQTRLNLMFLGQFRLQPTINTNKDSEIDAHKQESGIAPNFVHSQDGSHLRKTVVWAHEKYGIESFALIHDSFGTIPADAANLFKAVRETMVDTYESCDVLADFYDQFADQLHESQLDKMPALPAKGNLNLRDILESDFAFA

SEQ ID NO: 509 - DNA, 2670 bp, synthetic construct
  misc_feature 1..2670: note = Variant of RNA polymerase
  source 1..2670: mol_type = other DNA
atgcaccatcaccatcaccatatgaacacgattaacatcgctaagaacgacttctctgacatcgaactggctgctatcccgttcaacactctggctgaccattacggtgagggcttagctcgcgaacagttggcccttgagcatgagtcttacgagatgggtgaagcacgtttccgcaagatgtttgagcgtcaacttaaagctggtgaggttgcggataacgctgccgccaagcctctcatcactaccctactccctaagatgattgcacgcatcaacgactggtttgaggaagtgaaagctaagcgcggcaagcgcccgacagccttccagttcctgcaagaaatcaagccggaagccgtagcgtacatcaccattaagaccactctggcttgcctaaccagtgcggaccgtacaaccgttcaggctgtagcaagcgcaatcggtcgggccattgaggacgaggctcgcttcggtcgtatccgtgaccttgaagctaagcacttcaagaaaaactatgaggaacaactcaacaagcgcgtagggcacgtctacaagaaagcatttatgcaagttgtcgaggctgacatgctctctaagggtctactcggtggcgaggcgtggtcttcgtggcataaggaagactctattcatgtaggagtacgctgcatcgagatgctcattgagtcaaccggaatggttagcttacaccgccgtaatgctggcgtagtaggtcaagactctgagactatcgaactcgcacctgaatacgctgaggctatcgcaacccgtgcaggtgcgctggctggcatctctccgatgttccaaccttgcgtagttcctcctaagccgtggactggcattactggtggtggctattgggctaacggtcgtcgtcctctggcgctggtgcgtactcacagtaagaaaggtctgatgcgctacgaagacgtttacatgcctgaggtgtacaaagcgattaacattgcgcaaaacaccgcctggtcgatcaacaagtgggtcctggcggtcgccaacgtaatcaccaagtggaagcattgtccggtccgggacatccctgcgattgagcgtgaagaactcccgatgaaaccggaagacatcgacatgaatcctgaggctctcaccgcgtggaaacgtgctaaagctgctgtgtaccgcagagacaaggctcgcaagtctcgtcgtatcctgcttgagttcatgcttgagcaagccaataagtttgctaaccataaggccatctggttcccttacaacatggactggcgcggtcgtgtttacgctgtgtcaatgttcaacccgcaaggtaacgatatgaccaaaggactgcttacgctggcgaaaggtaaaccaatcggtaaggaaggttactactggctgaaaatccacggtgcaaactgtgcgggtgtcgataaggttccgttccctgagcgcatcaagttcattgaggaaaaccacgagaacatcatggcttgcgctaagtctccactggagaacacttggtgggctgagcaagatagtccgttctgcttccttgcgttctgctttgagtacgctggggtacagcaccacggcctgagctataactgctcccttccgctggcgtttgacgggtcttgctctggcatccagcacttctccgcgatgctccgagatgaggtaggtggtcgcgcggttaacttgcttcctagtgaaaccgttcaggacatctacgggattgttgctaagaaagtcaacgagattctacaagcagacgcaatcaatgggaccgataacgaagtagttaccgtgaccgatgagaacactggtgaaatctctgagaaagtcaagctgggcactaaggcactggctggtcaatggctggcttacggtgttactcgcagtgtgactaagcgttcagtcatgacgctggcttacgggtccaaagagttcggcttccgtcaacaagtgctgcgccacactattcagtgggctattgattccggcaagggtctgatgttcactcagccgaatcaggctgctggatacatggctaagctgatttgggaatctgtgagcgtgacggtggtagctgcggttgaagcaatgaactggcttaagtctgctgctaagctgctggctgctgaggtcaaagataagaagactggagagattcttcgcaagcgttgcgctgtgcattgggtaactcctgatggtttccctgtgtggcaggaatacaagaagcctattcagacgcgcttgaacctgatgttcctcggtcagttccgcttacagcctaccattaacaccaacaaagatagcgagattgatgcacataaacaggagtctggtatcgctcctaactttgtacacagccaagacggtagccaccttcgtaagactgtagtgtgggcacacgagaagtacggaatcgaatcttttgcactgattcacgactccttcggtaccattccggctgacgctgcgaacctgttcaaagcagtgcgcgaaactatggttgacacatatgagtcttgtgatgtactggctgatttctacgaccagttcgctgaccagttgcacgagtctcaattggacaaaatgccagcacttccggctaaaggtaacttgaacctccgtgacatcttagagtcggacttcgcgttcgcg

SEQ ID NO: 510 - protein, 890 aa, synthetic construct
  REGION 1..890: note = Variant of RNA polymerase
MHHHHHHMNTINIAKNDFSDIELAAIPFNTLADHYGEGLAREQLALEHESYEMGEARFRKMFERQLKAGEVADNAAAKPLITTLLPKMIARINDWFEEVKAKRGKRPTAFQFLQEIKPEAVAYITIKTTLACLTSADRTTVQAVASAIGRAIEDEARFGRIRDLEAKHFKKNYEEQLNKRVGHVYKKAFMQVVEADMLSKGLLGGEAWSSWHKEDSIHVGVRCIEMLIESTGMVSLHRRNAGVVGQDSETIELAPEYAEAIATRAGALAGISPMFQPCVVPPKPWTGITGGGYWANGRRPLALVRTHSKKGLMRYEDVYMPEVYKAINIAQNTAWSINKWVLAVANVITKWKHCPVRDIPAIEREELPMKPEDIDMNPEALTAWKRAKAAVYRRDKARKSRRILLEFMLEQANKFANHKAIWFPYNMDWRGRVYAVSMFNPQGNDMTKGLLTLAKGKPIGKEGYYWLKIHGANCAGVDKVPFPERIKFIEENHENIMACAKSPLENTWWAEQDSPFCFLAFCFEYAGVQHHGLSYNCSLPLAFDGSCSGIQHFSAMLRDEVGGRAVNLLPSETVQDIYGIVAKKVNEILQADAINGTDNEVVTVTDENTGEISEKVKLGTKALAGQWLAYGVTRSVTKRSVMTLAYGSKEFGFRQQVLRHTIQWAIDSGKGLMFTQPNQAAGYMAKLIWESVSVTVVAAVEAMNWLKSAAKLLAAEVKDKKTGEILRKRCAVHWVTPDGFPVWQEYKKPIQTRLNLMFLGQFRLQPTINTNKDSEIDAHKQESGIAPNFVHSQDGSHLRKTVVWAHEKYGIESFALIHDSFGTIPADAANLFKAVRETMVDTYESCDVLADFYDQFADQLHESQLDKMPALPAKGNLNLRDILESDFAFA

SEQ ID NO: 511 - DNA, 2670 bp, synthetic construct
  misc_feature 1..2670: note = Variant of RNA polymerase
  source 1..2670: mol_type = other DNA
atgcaccatcaccatcaccatatgaacacgattaacatcgctaagaacgacttctctgacatcgaactggctgctatcccgttcaacactctggctgaccattacggtgagggcttagctcgcgaacagttggcccttgagcatgagtcttacgagatgggtgaagcacgtttccgcaagatgtttgagcgtcaacttaaagctggtgaggttgcggataacgctgccgccaagcctctcatcactaccctactccctaagatgattgcacgcatcaacgactggtttgaggaagtgaaagctaagcgcggcaagcgcccgacagccttccagttcctgcaagaaatcaagccggaagccgtagcgtacatcaccattaagaccactctggcttgcctaaccagtgcggaccgtacaaccgttcaggctgtagcaagcgcaatcggtcgggccattgaggacgaggctcgcttcggtcgtatccgtgaccttgaagctaagcacttcaagaaaaactatgaggaacaactcaacaagcgcgtagggcacgtctacaagaaagcatttatgcaagttgtcgaggctgacatgctctctaagggtctactcggtggcgaggcgtggtcttcgtggcataaggaagactctattcatgtaggagtacgctgcatcgagatgctcattgagtcaaccggaatggttagcttacaccgccaaaatgctggcgtagtaggtcaagactctgagactatcgaactcgcacctgaactggctgaggctatcgcaacccgtgcaggtgcgctggctggcatctctccgatgttccaaccttgcgtagttcctcctaagccgtggactggcattactggtggtggctattgggctaacggtcgtcgtcctctggcgctggtgcgtactcacagtaagaaaggtctgatgcgctacgaagacgtttacatgcctgaggtgtacaaagcgattaacattgcgcaaaacaccgcctggtcgatcaacaagtgggtcctggcggtcgccaacgtaatcaccaagtggaagcattgtccggtccgggacatccctgcgattgagcgtgaagaactcccgatgaaaccggaagacatcgacatgaatcctgaggctctcaccgcgtggaaacgtgctaaagctgctgtgtaccgcagagacaaggctcgcaagtctcgtcgtatcctgcttgagttcatgcttgagcaagccaataagtttgctaaccataaggccatctggttcccttacaacatggactggcgcggtcgtgtttacgctgtgtcaatgttcaacccgcaaggtaacgatatgaccaaaggactgcttacgctggcgaaaggtaaaccaatcggtaaggaaggttactactggctgaaaatccacggtgcaaactgtgcgggtgtcgataaggttccgttccctgagcgcatcaagttcattgaggaaaaccacgagaacatcatggcttgcgctaagtctccactggagaacacttggtgggctgagcaagatagtccgttctgcttccttgcgttctgctttgagtacgctggggtacagcaccacggcctgagctataactgctcccttccgctggcgtttgacgggtcttgctctggcatccagcacttctccgcgatgctccgagatgaggtaggtggtcgcgcggttaacttgcttcctagtgaaaccgttcaggacatctacgggattgttgctaagaaagtcaacgagattctacaagcagacgcaatcaatgggaccgataacgaagtagttaccgtgaccgatgagaacactggtgaaatctctgagaaagtcaagctgggcactaaggcactggctggtcaatggctggcttacggtgttactcgcagtgtgactaagcgttcagtcatgacgctggcttacgggtccaaagagttcggcttccgtcaacaagtgctgcgccacactattcagtgggctattgattccggcaagggtctgatgttcactcagccgaatcaggctgctggatacatggctaagctgatttgggaatctgtgagcgtgacggtggtagctgcggttgaagcaatgaactggcttaagtctgctgctaagctgctggctgctgaggtcaaagataagaagactggagagattcttcgcaagcgttgcgctgtgcattgggtaactcctgatggtttccctgtgtggcaggaatacaagaagcctattcagacgcgcttgaacctgatgttcctcggtcagttccgcttacagcctaccattaacaccaacaaagatagcgagattgatgcacataaacaggagtctggtatcgctcctaactttgtacacagccaagacggtagccaccttcgtaagactgtagtgtgggcacacgagaagtacggaatcgaatcttttgcactgattcacgactccttcggtaccattccggctgacgctgcgaacctgttcaaagcagtgcgcgaaactatggttgacacatatgagtcttgtgatgtactggctgatttctacgaccagttcgctgaccagttgcacgagtctcaattggacaaaatgccagcacttccggctaaaggtaacttgaacctccgtgacatcttagagtcggacttcgcgttcgcg

SEQ ID NO: 512 - protein, 890 aa, synthetic construct
  REGION 1..890: note = Variant of RNA polymerase
MHHHHHHMNTINIAKNDFSDIELAAIPFNTLADHYGEGLAREQLALEHESYEMGEARFRKMFERQLKAGEVADNAAAKPLITTLLPKMIARINDWFEEVKAKRGKRPTAFQFLQEIKPEAVAYITIKTTLACLTSADRTTVQAVASAIGRAIEDEARFGRIRDLEAKHFKKNYEEQLNKRVGHVYKKAFMQVVEADMLSKGLLGGEAWSSWHKEDSIHVGVRCIEMLIESTGMVSLHRQNAGVVGQDSETIELAPELAEAIATRAGALAGISPMFQPCVVPPKPWTGITGGGYWANGRRPLALVRTHSKKGLMRYEDVYMPEVYKAINIAQNTAWSINKWVLAVANVITKWKHCPVRDIPAIEREELPMKPEDIDMNPEALTAWKRAKAAVYRRDKARKSRRILLEFMLEQANKFANHKAIWFPYNMDWRGRVYAVSMFNPQGNDMTKGLLTLAKGKPIGKEGYYWLKIHGANCAGVDKVPFPERIKFIEENHENIMACAKSPLENTWWAEQDSPFCFLAFCFEYAGVQHHGLSYNCSLPLAFDGSCSGIQHFSAMLRDEVGGRAVNLLPSETVQDIYGIVAKKVNEILQADAINGTDNEVVTVTDENTGEISEKVKLGTKALAGQWLAYGVTRSVTKRSVMTLAYGSKEFGFRQQVLRHTIQWAIDSGKGLMFTQPNQAAGYMAKLIWESVSVTVVAAVEAMNWLKSAAKLLAAEVKDKKTGEILRKRCAVHWVTPDGFPVWQEYKKPIQTRLNLMFLGQFRLQPTINTNKDSEIDAHKQESGIAPNFVHSQDGSHLRKTVVWAHEKYGIESFALIHDSFGTIPADAANLFKAVRETMVDTYESCDVLADFYDQFADQLHESQLDKMPALPAKGNLNLRDILESDFAFA

SEQ ID NO: 513 - DNA, 2670 bp, synthetic construct
  misc_feature 1..2670: note = Variant of RNA polymerase
  source 1..2670: mol_type = other DNA
atgcaccatcaccatcaccatatgaacacgattaacatcgctaagaacgacttctctgacatcgaactggctgctatcccgttcaacactctggctgaccattacggtgagggcttagctcgcgaacagttggcccttgagcatgagtcttacgagatgggtgaagcacgtttccgcaagatgtttgagcgtcaacttaaagctggtgaggttgcggataacgctgccgccaagcctctcatcactaccctactccctaagatgattgcacgcatcaacgactggtttgaggaagtgaaagctaagcgcggcaagcgcccgacagccttccagttcctgcaagaaatcaagccggaagccgtagcgtacatcaccattaagaccactctggcttgcctaaccagtgcggaccgtacaaccgttcaggctgtagcaagcgcaatcggtcgggccattgaggacgaggctcgcttcggtcgtatccgtgaccttgaagctaagcacttcaagaaaaactatgaggaacaactcaacaagcgcgtagggcacgtctacaagaaagcatttatgcaagttgtcgaggctgacatgctctctaagggtctactcggtggcgaggcgtggtcttcgtggcataaggaagactctattcatgtaggagtacgctgcatcgagatgctcattgagtcaaccggaatggttagcttacaccgccaaatggctggcgtagtaggtcaagactctgagactatcgaactcgcacctgaatacgctgaggctatcgcaacccgtgcaggtgcgctggctggcatctctccgatgttccaaccttgcgtagttcctcctaagccgtggactggcattactggtggtggctattgggctaacggtcgtcgtcctctggcgctggtgcgtactcacagtaagaaaggtctgatgcgctacgaagacgtttacatgcctgaggtgtacaaagcgattaacattgcgcaaaacaccgcctggtcgatcaacaagtgggtcctggcggtcgccaacgtaatcaccaagtggaagcattgtccggtccgggacatccctgcgattgagcgtgaagaactcccgatgaaaccggaagacatcgacatgaatcctgaggctctcaccgcgtggaaacgtgctaaagctgctgtgtaccgcagagacaaggctcgcaagtctcgtcgtatcctgcttgagttcatgcttgagcaagccaataagtttgctaaccataaggccatctggttcccttacaacatggactggcgcggtcgtgtttacgctgtgtcaatgttcaacccgcaaggtaacgatatgaccaaaggactgcttacgctggcgaaaggtaaaccaatcggtaaggaaggttactactggctgaaaatccacggtgcaaactgtgcgggtgtcgataaggttccgttccctgagcgcatcaagttcattgaggaaaaccacgagaacatcatggcttgcgctaagtctccactggagaacacttggtgggctgagcaagatagtccgttctgcttccttgcgttctgctttgagtacgctggggtacagcaccacggcctgagctataactgctcccttccgctggcgtttgacgggtcttgctctggcatccagcacttctccgcgatgctccgagatgaggtaggtggtcgcgcggttaacttgcttcctagtgaaaccgttcaggacatctacgggattgttgctaagaaagtcaacgagattctacaagcagacgcaatcaatgggaccgataacgaagtagttaccgtgaccgatgagaacactggtgaaatctctgagaaagtcaagctgggcactaaggcactggctggtcaatggctggcttacggtgttactcgcagtgtgactaagcgttcagtcatgacgctggcttacgggtccaaagagttcggcttccgtcaacaagtgctgcgccacactattcagtgggctattgattccggcaagggtctgatgttcactcagccgaatcaggctgctggatacatggctaagctgatttgggaatctgtgagcgtgacggtggtagctgcggttgaagcaatgaactggcttaagtctgctgctaagctgctggctgctgaggtcaaagataagaagactggagagattcttcgcaagcgttgcgctgtgcattgggtaactcctgatggtttccctgtgtggcaggaatacaagaagcctattcagacgcgcttgaacctgatgttcctcggtcagttccgcttacagcctaccattaacaccaacaaagatagcgagattgatgcacataaacaggagtctggtatcgctcctaactttgtacacagccaagacggtagccaccttcgtaagactgtagtgtgggcacacgagaagtacggaatcgaatcttttgcactgattcacgactccttcggtaccattccggctgacgctgcgaacctgttcaaagcagtgcgcgaaactatggttgacacatatgagtcttgtgatgtactggctgatttctacgaccagttcgctgaccagttgcacgagtctcaattggacaaaatgccagcacttccggctaaaggtaacttgaacctccgtgacatcttagagtcggacttcgcgttcgcg

SEQ ID NO: 514 - protein, 890 aa, synthetic construct
  REGION 1..890: note = Variant of RNA polymerase
MHHHHHHMNTINIAKNDFSDIELAAIPFNTLADHYGEGLAREQLALEHESYEMGEARFRKMFERQLKAGEVADNAAAKPLITTLLPKMIARINDWFEEVKAKRGKRPTAFQFLQEIKPEAVAYITIKTTLACLTSADRTTVQAVASAIGRAIEDEARFGRIRDLEAKHFKKNYEEQLNKRVGHVYKKAFMQVVEADMLSKGLLGGEAWSSWHKEDSIHVGVRCIEMLIESTGMVSLHRQMAGVVGQDSETIELAPEYAEAIATRAGALAGISPMFQPCVVPPKPWTGITGGGYWANGRRPLALVRTHSKKGLMRYEDVYMPEVYKAINIAQNTAWSINKWVLAVANVITKWKHCPVRDIPAIEREELPMKPEDIDMNPEALTAWKRAKAAVYRRDKARKSRRILLEFMLEQANKFANHKAIWFPYNMDWRGRVYAVSMFNPQGNDMTKGLLTLAKGKPIGKEGYYWLKIHGANCAGVDKVPFPERIKFIEENHENIMACAKSPLENTWWAEQDSPFCFLAFCFEYAGVQHHGLSYNCSLPLAFDGSCSGIQHFSAMLRDEVGGRAVNLLPSETVQDIYGIVAKKVNEILQADAINGTDNEVVTVTDENTGEISEKVKLGTKALAGQWLAYGVTRSVTKRSVMTLAYGSKEFGFRQQVLRHTIQWAIDSGKGLMFTQPNQAAGYMAKLIWESVSVTVVAAVEAMNWLKSAAKLLAAEVKDKKTGEILRKRCAVHWVTPDGFPVWQEYKKPIQTRLNLMFLGQFRLQPTINTNKDSEIDAHKQESGIAPNFVHSQDGSHLRKTVVWAHEKYGIESFALIHDSFGTIPADAANLFKAVRETMVDTYESCDVLADFYDQFADQLHESQLDKMPALPAKGNLNLRDILESDFAFA

SEQ ID NO: 515 - DNA, 2670 bp, synthetic construct
  misc_feature 1..2670: note = Variant of RNA polymerase
  source 1..2670: mol_type = other DNA
atgcaccatcaccatcaccatatgaacacgattaacatcgctaagaacgacttctctgacatcgaactggctgctatcccgttcaacactctggctgaccattacggtgagggcttagctcgcgaacagttggcccttgagcatgagtcttacgagatgggtgaagcacgtttccgcaagatgtttgagcgtcaacttaaagctagtgaggttgcggataacgctgccgccaagcctctcatcactaccctactccctaagatgattgcacgcatcaacgactggtttgaggaagtgaaagctaagcgcggcaagcgcccgacagccttccagttcctgcaagaaatcaagccggaagccgtagcgtacatcaccattaagaccactctggcttgcctaaccagtgcggaccgtacaaccgttcaggctgtagcaagcgcaatcggtcgggccattgaggacgaggctcgcttcggtcgtaggcgtgaccttgaagctaagcacttcaagaaaaactatgaggaacaactcaacaagcgcgtagggcacgtctacaagaaagcatttatgcaagttgtcgaggctgacatgctctctaagggtctactcggtggcgaggcgtggtcttcgtggcataaggaagactctattcatgtaggagtacgctgcatcgagatgctcattgagtcaaccggaatggttagcttacaccgccaaaatgctggcgtagtaggtcaagactctgagactatcgaactcgcacctgaatacgctgaggctatcgcaacccgtgcaggtgcgctggctggcatctctccgatgttccaaccttgcgtagttcctcctaagccgtggactggcattactggtggtggctattgggctaacggtcgtcgtcctctggcgctggtgcgtactcacagtaagaaaggtctgatgcgctacgaagacgtttacatgcctgaggtgtacaaagcgattaacattgcgcaaaacaccgcctggtcgatcaacaagtgggtcctggcggtcgccaacgtaatcaccaagtggaagcattgtccggtccgggacatccctgcgattgagcgtgaagaactcccgatgaaaccggaagacatcgacatgaatcctgaggctctcaccgcgtggaaacgtgctaaagctgctgtgtaccgcagagacaaggctcgcaagtctcgtcgtatcctgcttgagttcatgcttgagcaagccaataagtttgctaaccataaggccatctggttcccttacaacatggactggcgcggtcgtgtttacgctgtgtcaatgttcaacccgcaaggtaacgatatgaccaaaggactgcttacgctggcgaaaggtaaaccaatcggtaaggaaggttactactggctgaaaatccacggtgcaaactgtgcgggtgtcgataaggttccgttccctgagcgcatcaagttcattgaggaaaaccacgagaacatcatggcttgcgctaagtctccactggagaacacttggtgggctgagcaagatagtccgttctgcttccttgcgttctgctttgagtacgctggggtacagcaccacggcctgagctataactgctcccttccgctggcgtttgacgggtcttgctctggcatccagcacttctccgcgatgctccgagatgaggtaggtggtcgcgcggttaacttgcttcctagtgaaaccgttcaggacatctacgggattgttgctaagaaagtcaacgagattctacaagcagacgcaatcaatgggaccgataacgaagtagttaccgtgaccgatgagaacactggtgaaatctctgagaaagtcaagctgggcactaaggcactggctggtcaatggctggcttacggtgttactcgcagtgtgactaagcgttcagtcatgacgctggcttacgggtccaaagagttcggcttccgtcaacaagtgctgcgccacactattcagtgggctattgattccggcaagggtctgatgttcactcagccgaatcaggctgctggatacatggctaagctgatttgggaatctgtgagcgtgacggtggtagctgcggttgaagcaatgaactggcttaagtctgctgctaagctgctggctgctgaggtcaaagataagaagactggagagattcttcgcaagcgttgcgctgtgcattgggtaactcctgatggtttccctgtgtggcaggaatacaagaagcctattcagacgcgcttgaacctgatgttcctcggtcagttccgcttacagcctaccattaacaccaacaaagatagcgagattgatgcacataaacaggagtctggtatcgctcctaactttgtacacagccaagacggtagccaccttcgtaagactgtagtgtgggcacacgagaagtacggaatcgaatcttttgcactgattcacgactccttcggtaccattccggctgacgctgcgaacctgttcaaagcagtgcgcgaaactatggttgacacatatgagtcttgtgatgtactggctgatttctacgaccagttcgctgaccagttgcacgagtctcaattggacaaaatgccagcacttccggctaaaggtaacttgaacctccgtgacatcttagagtcggacttcgcgttcgcg

SEQ ID NO: 516 - protein, 890 aa, synthetic construct
  REGION 1..890: note = Variant of RNA polymerase
MHHHHHHMNTINIAKNDFSDIELAAIPFNTLADHYGEGLAREQLALEHESYEMGEARFRKMFERQLKASEVADNAAAKPLITTLLPKMIARINDWFEEVKAKRGKRPTAFQFLQEIKPEAVAYITIKTTLACLTSADRTTVQAVASAIGRAIEDEARFGRRRDLEAKHFKKNYEEQLNKRVGHVYKKAFMQVVEADMLSKGLLGGEAWSSWHKEDSIHVGVRCIEMLIESTGMVSLHRQNAGVVGQDSETIELAPEYAEAIATRAGALAGISPMFQPCVVPPKPWTGITGGGYWANGRRPLALVRTHSKKGLMRYEDVYMPEVYKAINIAQNTAWSINKWVLAVANVITKWKHCPVRDIPAIEREELPMKPEDIDMNPEALTAWKRAKAAVYRRDKARKSRRILLEFMLEQANKFANHKAIWFPYNMDWRGRVYAVSMFNPQGNDMTKGLLTLAKGKPIGKEGYYWLKIHGANCAGVDKVPFPERIKFIEENHENIMACAKSPLENTWWAEQDSPFCFLAFCFEYAGVQHHGLSYNCSLPLAFDGSCSGIQHFSAMLRDEVGGRAVNLLPSETVQDIYGIVAKKVNEILQADAINGTDNEVVTVTDENTGEISEKVKLGTKALAGQWLAYGVTRSVTKRSVMTLAYGSKEFGFRQQVLRHTIQWAIDSGKGLMFTQPNQAAGYMAKLIWESVSVTVVAAVEAMNWLKSAAKLLAAEVKDKKTGEILRKRCAVHWVTPDGFPVWQEYKKPIQTRLNLMFLGQFRLQPTINTNKDSEIDAHKQESGIAPNFVHSQDGSHLRKTVVWAHEKYGIESFALIHDSFGTIPADAANLFKAVRETMVDTYESCDVLADFYDQFADQLHESQLDKMPALPAKGNLNLRDILESDFAFA

SEQ ID NO: 517 - DNA, 2670 bp, synthetic construct
  misc_feature 1..2670: note = Variant of RNA polymerase
  source 1..2670: mol_type = other DNA
atgcaccatcaccatcaccatatgaacacgattaacatcgctaagaacgacttctctgacatcgaactggctgctatcccgttcaacactctggctgaccattacggtgagggcttagctcgcgaacagttggcccttgagcatgagtcttacgagatgggtgaagcacgtttccgcaagatgtttgagcgtcaacttaaagctggtgaggttgcggataacgctgccgccaagcctctcatcactaccctactccctaagatgattgcacgcatcaacgactggtttgaggaagtgaaagctaagcgcggcaagcgcccgacagccttccagttcctgcaagaaatcaagccggaagccgtagcgtacatcaccattaagaccactctggcttgcctaaccagtgcggaccgtacaaccgttcaggctgtagcaagcgcaatcggtcgggccattgaggacgaggctcgcttcggtcgtatccgtgaccttgaagctaagcacttcaagaaaaactatgaggaacaactcaacaagcgcgtagggcacgtctacaagaaagcatttatgcaagttgtcgaggctgacatgctctctaagggtctactcggtggcgaggcgtggtcttcgtggcataaggaagactctattcatgtaggagtacgctgcatcgagatgctcattgagtcaaccggaatggttagcttacaccgccaaaatgctggcgtagtaggtcaagactctgagactatcgaatatgcacctgaatacgctgaggctatcgcaacccgtgcaggtgcgctggctggcatctctccgatgttccaaccttgcgtagttcctcctaagccgtggactggcattactggtggtggctattgggctaacggtcgtcgtcctctggcgctggtgcgtactcacagtaagaaaggtctgatgcgctacgaagacgtttacatgcctgaggtgtacaaagcgattaacattgcgcaaaacaccgcctggtcgatcaacaagtgggtcctggcggtcgccaacgtaatcaccaagtggaagcattgtccggtccgggacatccctgcgattgagcgtgaagaactcccgatgaaaccggaagacatcgacatgaatcctgaggctctcaccgcgtggaaacgtgctaaagctgctgtgtaccgcagagacaaggctcgcaagtctcgtcgtatcctgcttgagttcatgcttgagcaagccaataagtttgctaaccataaggccatctggttcccttacaacatggactggcgcggtcgtgtttacgctgtgtcaatgttcaacccgcaaggtaacgatatgaccaaaggactgcttacgctggcgaaaggtaaaccaatcggtaaggaaggttactactggctgaaaatccacggtgcaaactgtgcgggtgtcgataaggttccgttccctgagcgcatcaagttcattgaggaaaaccacgagaacatcatggcttgcgctaagtctccactggagaacacttggtgggctgagcaagatagtccgttctgcttccttgcgttctgctttgagtacgctggggtacagcaccacggcctgagctataactgctcccttccgctggcgtttgacgggtcttgctctggcatccagcacttctccgcgatgctccgagatgaggtaggtggtcgcgcggttaacttgcttcctagtgaaaccgttcaggacatctacgggattgttgctaagaaagtcaacgagattctacaagcagacgcaatcaatgggaccgataacgaagtagttaccgtgaccgatgagaacactggtgaaatctctgagaaagtcaagctgggcactaaggcactggctggtcaatggctggcttacggtgttactcgcagtgtgactaagcgttcagtcatgacgctggcttacgggtccaaagagttcggcttccgtcaacaagtgctgcgccacactattcagtgggctattgattccggcaagggtctgatgttcactcagccgaatcaggctgctggatacatggctaagctgatttgggaatctgtgagcgtgacggtggtagctgcggttgaagcaatgaactggcttaagtctgctgctaagctgctggctgctgaggtcaaagataagaagactggagagattcttcgcaagcgttgcgctgtgcattgggtaactcctgatggtttccctgtgtggcaggaatacaagaagcctattcagacgcgcttgaacctgatgttcctcggtcagttccgcttacagcctaccattaacaccaacaaagatagcgagattgatgcacataaacaggagtctggtatcgctcctaactttgtacacagccaagacggtagccaccttcgtaagactgtagtgtgggcacacgagaagtacggaatcgaatcttttgcactgattcacgactccttcggtaccattccggctgacgctgcgaacctgttcaaagcagtgcgcgaaactatggttgacacatatgagtcttgtgatgtactggctgatttctacgaccagttcgctgaccagttgcacgagtctcaattggacaaaatgccagcacttccggctaaaggtaacttgaacctccgtgacatcttagagtcggacttcgcgttcgcg

SEQ ID NO: 518 - protein, 890 aa, synthetic construct
  REGION 1..890: note = Variant of RNA polymerase
MHHHHHHMNTINIAKNDFSDIELAAIPFNTLADHYGEGLAREQLALEHESYEMGEARFRKMFERQLKAGEVADNAAAKPLITTLLPKMIARINDWFEEVKAKRGKRPTAFQFLQEIKPEAVAYITIKTTLACLTSADRTTVQAVASAIGRAIEDEARFGRIRDLEAKHFKKNYEEQLNKRVGHVYKKAFMQVVEADMLSKGLLGGEAWSSWHKEDSIHVGVRCIEMLIESTGMVSLHRQNAGVVGQDSETIEYAPEYAEAIATRAGALAGISPMFQPCVVPPKPWTGITGGGYWANGRRPLALVRTHSKKGLMRYEDVYMPEVYKAINIAQNTAWSINKWVLAVANVITKWKHCPVRDIPAIEREELPMKPEDIDMNPEALTAWKRAKAAVYRRDKARKSRRILLEFMLEQANKFANHKAIWFPYNMDWRGRVYAVSMFNPQGNDMTKGLLTLAKGKPIGKEGYYWLKIHGANCAGVDKVPFPERIKFIEENHENIMACAKSPLENTWWAEQDSPFCFLAFCFEYAGVQHHGLSYNCSLPLAFDGSCSGIQHFSAMLRDEVGGRAVNLLPSETVQDIYGIVAKKVNEILQADAINGTDNEVVTVTDENTGEISEKVKLGTKALAGQWLAYGVTRSVTKRSVMTLAYGSKEFGFRQQVLRHTIQWAIDSGKGLMFTQPNQAAGYMAKLIWESVSVTVVAAVEAMNWLKSAAKLLAAEVKDKKTGEILRKRCAVHWVTPDGFPVWQEYKKPIQTRLNLMFLGQFRLQPTINTNKDSEIDAHKQESGIAPNFVHSQDGSHLRKTVVWAHEKYGIESFALIHDSFGTIPADAANLFKAVRETMVDTYESCDVLADFYDQFADQLHESQLDKMPALPAKGNLNLRDILESDFAFA

SEQ ID NO: 519 - DNA, 2670 bp, synthetic construct
  misc_feature 1..2670: note = Variant of RNA polymerase
  source 1..2670: mol_type = other DNA
atgcaccatcaccatcaccatatgaacacgattaacatctataagaacgacttctctgacatcgaactggctgctatcccgttcaacactctggctgaccattacggtgagggcttagctcgcgaacagttggcccttgagcatgagtcttacgagatgggtgaagcacgtttccgcaagatgtttgagcgtcaacttaaagctggtgaggttgcggataacgctgccgccaagcctctcatcactaccctactccctaagatgattgcacgcatcaacgactggtttgaggaagtgaaagctaagcgcggcaagcgcccgacagccttccagttcctgcaagaaatcaagccggaagccgtagcgtacatcaccattaagaccactctggcttgcctaaccagtgcggaccgtacaaccgttcaggctgtagcaagcgcaatcggtcgggccattgaggacgaggctcgcttcggtcgtatccgtgaccttgaagctaagcacttcaagaaaaactatgaggaacaactcaacaagcgcgtagggcacgtctacaagaaagcatttatgcaagttgtcgaggctgacatgctctctaagggtctactcggtggcgaggcgtggtcttcgtggcataaggaagactctattcatgtaggagtacgctgcatcgagatgctcattgagtcaaccggaatggttagcttacaccgccaaaatgctggcgtagtaggtcaagactctgagactatcgaactcgcacctgaatacgctgaggctatcgcaacccgtgcaggtgcgctggctggcatctctccgatgttccaaccttgcgtagttcctcctaagccgtggactggcattactggtggtggctattgggctaacggtcgtcgtcctctggcgctggtgcgtactcacagtaagaaaggtctgatgcgctacgaagacgtttacatgcctgaggtgtacaaagcgattaacattgcgcaaaacaccgcctggtcgatcaacaagtgggtcctggcggtcgccaacgtaatcaccaagtggaagcattgtccggtccgggacatccctgcgattgagcgtgaagaactcccgatgaaaccggaagacatcgacatgaatcctgaggctctcaccgcgtggaaacgtgctaaagctgctgtgtaccgcagagacaaggctcgcaagtctcgtcgtatcctgcttgagttcatgcttgagcaagccaataagtttgctaaccataaggccatctggttcccttacaacatggactggcgcggtcgtgtttacgctgtgtcaatgttcaacccgcaaggtaacgatatgaccaaaggactgcttacgctggcgaaaggtaaaccaatcggtaaggaaggttactactggctgaaaatccacggtgcaaactgtgcgggtgtcgataaggttccgttccctgagcgcatcaagttcattgaggaaaaccacgagaacatcatggcttgcgctaagtctccactggagaacacttggtgggctgagcaagatagtccgttctgcttccttgcgttctgctttgagtacgctggggtacagcaccacggcctgagctataactgctcccttccgctggcgtttgacgggtcttgctctggcatccagcacttctccgcgatgctccgagatgaggtaggtggtcgcgcggttaacttgcttcctagtgaaaccgttcaggacatctacgggattgttgctaagaaagtcaacgagattctacaagcagacgcaatcaatgggaccgataacgaagtagttaccgtgaccgatgagaacactggtgaaatctctgagaaagtcaagctgggcactaaggcactggctggtcaatggctggcttacggtgttactcgcagtgtgactaagcgttcagtcatgacgctggcttacgggtccaaagagttcggcttccgtcaacaagtgctgcgccacactattcagtgggctattgattccggcaagggtctgatgttcactcagccgaatcaggctgctggatacatggctaagctgatttgggaatctgtgagcgtgacggtggtagctgcggttgaagcaatgaactggcttaagtctgctgctaagctgctggctgctgaggtcaaagataagaagactggagagattcttcgcaagcgttgcgctgtgcattgggtaactcctgatggtttccctgtgtggcaggaatacaagaagcctattcagacgcgcttgaacctgatgttcctcggtcagttccgcttacagcctaccattaacaccaacaaagatagcgagattgatgcacataaacaggagtctggtatcgctcctaactttgtacacagccaagacggtagccaccttcgtaagactgtagtgtgggcacacgagaagtacggaatcgaatcttttgcactgattcacgactccttcggtaccattccggctgacgctgcgaacctgttcaaagcagtgcgcgaaactatggttgacacatatgagtcttgtgatgtactggctgatttctacgaccagttcgctgaccagttgcacgagtctcaattggacaaaatgccagcacttccggctaaaggtaacttgaacctccgtgacatcttagagtcggacttcgcgttcgcg

SEQ ID NO: 520 - protein, 890 aa, synthetic construct
  REGION 1..890: note = Variant of RNA polymerase
MHHHHHHMNTINIYKNDFSDIELAAIPFNTLADHYGEGLAREQLALEHESYEMGEARFRKMFERQLKAGEVADNAAAKPLITTLLPKMIARINDWFEEVKAKRGKRPTAFQFLQEIKPEAVAYITIKTTLACLTSADRTTVQAVASAIGRAIEDEARFGRIRDLEAKHFKKNYEEQLNKRVGHVYKKAFMQVVEADMLSKGLLGGEAWSSWHKEDSIHVGVRCIEMLIESTGMVSLHRQNAGVVGQDSETIELAPEYAEAIATRAGALAGISPMFQPCVVPPKPWTGITGGGYWANGRRPLALVRTHSKKGLMRYEDVYMPEVYKAINIAQNTAWSINKWVLAVANVITKWKHCPVRDIPAIEREELPMKPEDIDMNPEALTAWKRAKAAVYRRDKARKSRRILLEFMLEQANKFANHKAIWFPYNMDWRGRVYAVSMFNPQGNDMTKGLLTLAKGKPIGKEGYYWLKIHGANCAGVDKVPFPERIKFIEENHENIMACAKSPLENTWWAEQDSPFCFLAFCFEYAGVQHHGLSYNCSLPLAFDGSCSGIQHFSAMLRDEVGGRAVNLLPSETVQDIYGIVAKKVNEILQADAINGTDNEVVTVTDENTGEISEKVKLGTKALAGQWLAYGVTRSVTKRSVMTLAYGSKEFGFRQQVLRHTIQWAIDSGKGLMFTQPNQAAGYMAKLIWESVSVTVVAAVEAMNWLKSAAKLLAAEVKDKKTGEILRKRCAVHWVTPDGFPVWQEYKKPIQTRLNLMFLGQFRLQPTINTNKDSEIDAHKQESGIAPNFVHSQDGSHLRKTVVWAHEKYGIESFALIHDSFGTIPADAANLFKAVRETMVDTYESCDVLADFYDQFADQLHESQLDKMPALPAKGNLNLRDILESDFAFA

SEQ ID NO: 521 - DNA, 2670 bp, synthetic construct
  misc_feature 1..2670: note = Variant of RNA polymerase
  source 1..2670: mol_type = other DNA
atgcaccatcaccatcaccatatgaacacgattaacatcgctaagaacgacttctctgacatcgaactggctgctatcccgttcaacactctggctgaccattacggtgagggcttagctcgcgaacagttggcccttgagcatgagtcttacgagatgggtgaagcacgtttccgcaagatgtttgagcgtcaacttaaagctggtgaggttgcggataacgctgccgccaagcctctcatcactaccctactccctaagatgattgcacgcatcaacgactggtttgaggaagtgaaagctaagcgcggcaagcgcccgacagccttccagttcctgcaagaaatcaagccggaagccgtagcgtacatcaccattaagaccactctggcttgcctaaccagtgcggaccgtacaaccgttcaggctgtagcaagcgcaatcggtcgggccattgaggacgaggctcgcttcggtcgtatccgtgaccttgaagctaagcacttcaagaaaaactatgaggaacaactcaacaagcgcgtagggcacgtctacaagaaagcatttatgcaagttgtcgaggctgacatgctctctaagggtctactcggtggcgaggcgtggtcttcgtggcataaggaagactctattcatgtaggatgtcgctgcatcgagatgctcattgagtcaaccggaatggttagcttacaccgccaaaatgctggcgtagtaggtcaagactctgagactatcgaactcgcacctgaatacgctgaggctatcgcaacccgtgcaggtgcgctggctggcatctctccgatgttccaaccttgcgtagttcctcctaagccgtggactggcattactggtggtggctattgggctaacggtcgtcgtcctctggcgctggtgcgtactcacagtaagaaaggtctgatgcgctacgaagacgtttacatgcctgaggtgtacaaagcgattaacattgcgcaaaacaccgcctggtcgatcaacaagtgggtcctggcggtcgccaacgtaatcaccaagtggaagcattgtccggtccgggacatccctgcgattgagcgtgaagaactcccgatgaaaccggaagacatcgacatgaatcctgaggctctcaccgcgtggaaacgtgctaaagctgctgtgtaccgcagagacaaggctcgcaagtctcgtcgtatcctgcttgagttcatgcttgagcaagccaataagtttgctaaccataaggccatctggttcccttacaacatggactggcgcggtcgtgtttacgctgtgtcaatgttcaacccgcaaggtaacgatatgaccaaaggactgcttacgctggcgaaaggtaaaccaatcggtaaggaaggttactactggctgaaaatccacggtgcaaactgtgcgggtgtcgataaggttccgttccctgagcgcatcaagttcattgaggaaaaccacgagaacatcatggcttgcgctaagtctccactggagaacacttggtgggctgagcaagatagtccgttctgcttccttgcgttctgctttgagtacgctggggtacagcaccacggcctgagctataactgctcccttccgctggcgtttgacgggtcttgctctggcatccagcacttctccgcgatgctccgagatgaggtaggtggtcgcgcggttaacttgcttcctagtgaaaccgttcaggacatctacgggattgttgctaagaaagtcaacgagattctacaagcagacgcaatcaatgggaccgataacgaagtagttaccgtgaccgatgagaacactggtgaaatctctgagaaagtcaagctgggcactaaggcactggctggtcaatggctggcttacggtgttactcgcagtgtgactaagcgttcagtcatgacgctggcttacgggtccaaagagttcggcttccgtcaacaagtgctgcgccacactattcagtgggctattgattccggcaagggtctgatgttcactcagccgaatcaggctgctggatacatggctaagctgatttgggaatctgtgagcgtgacggtggtagctgcggttgaagcaatgaactggcttaagtctgctgctaagctgctggctgctgaggtcaaagataagaagactggagagattcttcgcaagcgttgcgctgtgcattgggtaactcctgatggtttccctgtgtggcaggaatacaagaagcctattcagacgcgcttgaacctgatgttcctcggtcagttccgcttacagcctaccattaacaccaacaaagatagcgagattgatgcacataaacaggagtctggtatcgctcctaactttgtacacagccaagacggtagccaccttcgtaagactgtagtgtgggcacacgagaagtacggaatcgaatcttttgcactgattcacgactccttcggtaccattccggctgacgctgcgaacctgttcaaagcagtgcgcgaaactatggttgacacatatgagtcttgtgatgtactggctgatttctacgaccagttcgctgaccagttgcacgagtctcaattggacaaaatgccagcacttccggctaaaggtaacttgaacctccgtgacatcttagagtcggacttcgcgttcgcg

SEQ ID NO: 522 - protein, 890 aa, synthetic construct
  REGION 1..890: note = Variant of RNA polymerase
MHHHHHHMNTINIAKNDFSDIELAAIPFNTLADHYGEGLAREQLALEHESYEMGEARFRKMFERQLKAGEVADNAAAKPLITTLLPKMIARINDWFEEVKAKRGKRPTAFQFLQEIKPEAVAYITIKTTLACLTSADRTTVQAVASAIGRAIEDEARFGRIRDLEAKHFKKNYEEQLNKRVGHVYKKAFMQVVEADMLSKGLLGGEAWSSWHKEDSIHVGCRCIEMLIESTGMVSLHRQNAGVVGQDSETIELAPEYAEAIATRAGALAGISPMFQPCVVPPKPWTGITGGGYWANGRRPLALVRTHSKKGLMRYEDVYMPEVYKAINIAQNTAWSINKWVLAVANVITKWKHCPVRDIPAIEREELPMKPEDIDMNPEALTAWKRAKAAVYRRDKARKSRRILLEFMLEQANKFANHKAIWFPYNMDWRGRVYAVSMFNPQGNDMTKGLLTLAKGKPIGKEGYYWLKIHGANCAGVDKVPFPERIKFIEENHENIMACAKSPLENTWWAEQDSPFCFLAFCFEYAGVQHHGLSYNCSLPLAFDGSCSGIQHFSAMLRDEVGGRAVNLLPSETVQDIYGIVAKKVNEILQADAINGTDNEVVTVTDENTGEISEKVKLGTKALAGQWLAYGVTRSVTKRSVMTLAYGSKEFGFRQQVLRHTIQWAIDSGKGLMFTQPNQAAGYMAKLIWESVSVTVVAAVEAMNWLKSAAKLLAAEVKDKKTGEILRKRCAVHWVTPDGFPVWQEYKKPIQTRLNLMFLGQFRLQPTINTNKDSEIDAHKQESGIAPNFVHSQDGSHLRKTVVWAHEKYGIESFALIHDSFGTIPADAANLFKAVRETMVDTYESCDVLADFYDQFADQLHESQLDKMPALPAKGNLNLRDILESDFAFA

SEQ ID NO: 523 - DNA, 2670 bp, synthetic construct
  misc_feature 1..2670: note = Variant of RNA polymerase
  source 1..2670: mol_type = other DNA
atgcaccatcaccatcaccatatgaacacgattaacatcgctaagaacgacttctctgacatcgaactggctgctatcccgttcaacactctggctgaccattacggtgagggcttagctcgcgaacagttggcccttgagcatgagtcttacgagatgggtgaagcacgtttccgcaagatgtttgagcgtcaacttaaagctggtgaggttgcggataacgctgccgccaagcctctcatcactaccgctctccctaagatgattgcacgcatcaacgactggtttgaggaagtgaaagctaagcgcggcaagcgcccgacagccttccagttcctgcaagaaatcaagccggaagccgtagcgtacatcaccattaagaccactctggcttgcctaaccagtgcggaccgtacaaccgttcaggctgtagcaagcgcaatcggtcgggccattgaggacgaggctcgcttcggtcgtatccgtgaccttgaagctaagcacttcaagaaaaactatgaggaacaactcaacaagcgcgtagggcacgtctacaagaaagcatttatgcaagttgtcgaggctgacatgctctctaagggtctactcggtggcgaggcgtggtcttcgtggcataaggaagactctattcatgtaggagtacgctgcatcgagatgctcattgagtcaaccggaatggttagcttacaccgccaaaatgctggcgtagtaggtcaagactctgagactatcgaactcgcacctgaatacgctgaggctatcgcaacccgtgcaggtgcgctggctggcatctctccgatgttccaaccttgcgtagttcctcctaagccgtggactggcattactggtggtggctattgggctaacggtcgtcgtcctctggcgctggtgcgtactcacagtaagaaaggtctgatgcgctacgaagacgtttacatgcctgaggtgtacaaagcgattaacattgcgcaaaacaccgcctggtcgatcaacaagtgggtcctggcggtcgccaacgtaatcaccaagtggaagcattgtccggtccgggacatccctgcgattgagcgtgaagaactcccgatgaaaccggaagacatcgacatgaatcctgaggctctcaccgcgtggaaacgtgctaaagctgctgtgtaccgcagagacaaggctcgcaagtctcgtcgtatcctgcttgagttcatgcttgagcaagccaataagtttgctaaccataaggccatctggttcccttacaacatggactggcgcggtcgtgtttacgctgtgtcaatgttcaacccgcaaggtaacgatatgaccaaaggactgcttacgctggcgaaaggtaaaccaatcggtaaggaaggttactactggctgaaaatccacggtgcaaactgtgcgggtgtcgataaggttccgttccctgagcgcatcaagttcattgaggaaaaccacgagaacatcatggcttgcgctaagtctccactggagaacacttggtgggctgagcaagatagtccgttctgcttccttgcgttctgctttgagtacgctggggtacagcaccacggcctgagctataactgctcccttccgctggcgtttgacgggtcttgctctggcatccagcacttctccgcgatgctccgagatgaggtaggtggtcgcgcggttaacttgcttcctagtgaaaccgttcaggacatctacgggattgttgctaagaaagtcaacgagattctacaagcagacgcaatcaatgggaccgataacgaagtagttaccgtgaccgatgagaacactggtgaaatctctgagaaagtcaagctgggcactaaggcactggctggtcaatggctggcttacggtgttactcgcagtgtgactaagcgttcagtcatgacgctggcttacgggtccaaagagttcggcttccgtcaacaagtgctgcgccacactattcagtgggctattgattccggcaagggtctgatgttcactcagccgaatcaggctgctggatacatggctaagctgatttgggaatctgtgagcgtgacggtggtagctgcggttgaagcaatgaactggcttaagtctgctgctaagctgctggctgctgaggtcaaagataagaagactggagagattcttcgcaagcgttgcgctgtgcattgggtaactcctgatggtttccctgtgtggcaggaatacaagaagcctattcagacgcgcttgaacctgatgttcctcggtcagttccgcttacagcctaccattaacaccaacaaagatagcgagattgatgcacataaacaggagtctggtatcgctcctaactttgtacacagccaagacggtagccaccttcgtaagactgtagtgtgggcacacgagaagtacggaatcgaatcttttgcactgattcacgactccttcggtaccattccggctgacgctgcgaacctgttcaaagcagtgcgcgaaactatggttgacacatatgagtcttgtgatgtactggctgatttctacgaccagttcgctgaccagttgcacgagtctcaattggacaaaatgccagcacttccggctaaaggtaacttgaacctccgtgacatcttagagtcggacttcgcgttcgcg

SEQ ID NO: 524 - protein, 890 aa, synthetic construct
  REGION 1..890: note = Variant of RNA polymerase
MHHHHHHMNTINIAKNDFSDIELAAIPFNTLADHYGEGLAREQLALEHESYEMGEARFRKMFERQLKAGEVADNAAAKPLITTALPKMIARINDWFEEVKAKRGKRPTAFQFLQEIKPEAVAYITIKTTLACLTSADRTTVQAVASAIGRAIEDEARFGRIRDLEAKHFKKNYEEQLNKRVGHVYKKAFMQVVEADMLSKGLLGGEAWSSWHKEDSIHVGVRCIEMLIESTGMVSLHRQNAGVVGQDSETIELAPEYAEAIATRAGALAGISPMFQPCVVPPKPWTGITGGGYWANGRRPLALVRTHSKKGLMRYEDVYMPEVYKAINIAQNTAWSINKWVLAVANVITKWKHCPVRDIPAIEREELPMKPEDIDMNPEALTAWKRAKAAVYRRDKARKSRRILLEFMLEQANKFANHKAIWFPYNMDWRGRVYAVSMFNPQGNDMTKGLLTLAKGKPIGKEGYYWLKIHGANCAGVDKVPFPERIKFIEENHENIMACAKSPLENTWWAEQDSPFCFLAFCFEYAGVQHHGLSYNCSLPLAFDGSCSGIQHFSAMLRDEVGGRAVNLLPSETVQDIYGIVAKKVNEILQADAINGTDNEVVTVTDENTGEISEKVKLGTKALAGQWLAYGVTRSVTKRSVMTLAYGSKEFGFRQQVLRHTIQWAIDSGKGLMFTQPNQAAGYMAKLIWESVSVTVVAAVEAMNWLKSAAKLLAAEVKDKKTGEILRKRCAVHWVTPDGFPVWQEYKKPIQTRLNLMFLGQFRLQPTINTNKDSEIDAHKQESGIAPNFVHSQDGSHLRKTVVWAHEKYGIESFALIHDSFGTIPADAANLFKAVRETMVDTYESCDVLADFYDQFADQLHESQLDKMPALPAKGNLNLRDILESDFAFA

SEQ ID NO: 525 - DNA, 2670 bp, synthetic construct
  misc_feature 1..2670: note = Variant of RNA polymerase
  source 1..2670: mol_type = other DNA
atgcaccatcaccatcaccatatgaacacgattaacatcgctaagaacgacttctctgacatcgaactggctgctatcccgttcaacactctggctgaccattacggtgagggcttagctcgcgaacagttggcccttgagcatgagtcttacgagatgggtgaagcacgtttccgcaagatgtttgagcgtcaacttaaagctggtgaggttgcggataacgctgccgccaagcctctcatcactaccctactccctaagatgattgcacgcatcaacgactggtttgaggaagtgaaagctaagcgcggcaagcgcccgacagccttccagttcctgcaagttatcaagccggaagccgtagcgtacatcaccattaagaccactctggcttgcctaaccagtgcggaccgtacaaccgttcaggctgtagcaagcgcaatcggtcgggccattgaggacgaggctcgcttcggtcgtatccgtgaccttgaagctaagcacttcaagaaaaactatgaggaacaactcaacaagcgcgtagggcacgtctacaagaaagcatttatgcaagttgtcgaggctgacatgctctctaagggtctactcggtggcgaggcgtggtcttcgtggcataaggaagactctattcatgtaggagtacgctgcatcgagatgctcattgagtcaaccggaatggttagcttacaccgccaaaatgctggcgtagtaggtcaagactctgagactatcgaactcgcacctgaatacgctgaggctatcgcaacccgtgcaggtgcgctggctggcatctctccgatgttccaaccttgcgtagttcctcctaagccgtggactggcattactggtggtggctattgggctaacggtcgtcgtcctctggcgctggtgcgtactcacagtaagaaaggtctgatgcgctacgaagacgtttacatgcctgaggtgtacaaagcgattaacattgcgcaaaacaccgcctggtcgatcaacaagtgggtcctggcggtcgccaacgtaatcaccaagtggaagcattgtccggtccgggacatccctgcgattgagcgtgaagaactcccgatgaaaccggaagacatcgacatgaatcctgaggctctcaccgcgtggaaacgtgctaaagctgctgtgtaccgcagagacaaggctcgcaagtctcgtcgtatcctgcttgagttcatgcttgagcaagccaataagtttgctaaccataaggccatctggttcccttacaacatggactggcgcggtcgtgtttacgctgtgtcaatgttcaacccgcaaggtaacgatatgaccaaaggactgcttacgctggcgaaaggtaaaccaatcggtaaggaaggttactactggctgaaaatccacggtgcaaactgtgcgggtgtcgataaggttccgttccctgagcgcatcaagttcattgaggaaaaccacgagaacatcatggcttgcgctaagtctccactggagaacacttggtgggctgagcaagatagtccgttctgcttccttgcgttctgctttgagtacgctggggtacagcaccacggcctgagctataactgctcccttccgctggcgtttgacgggtcttgctctggcatccagcacttctccgcgatgctccgagatgaggtaggtggtcgcgcggttaacttgcttcctagtgaaaccgttcaggacatctacgggattgttgctaagaaagtcaacgagattctacaagcagacgcaatcaatgggaccgataacgaagtagttaccgtgaccgatgagaacactggtgaaatctctgagaaagtcaagctgggcactaaggcactggctggtcaatggctggcttacggtgttactcgcagtgtgactaagcgttcagtcatgacgctggcttacgggtccaaagagttcggcttccgtcaacaagtgctgcgccacactattcagtgggctattgattccggcaagggtctgatgttcactcagccgaatcaggctgctggatacatggctaagctgatttgggaatctgtgagcgtgacggtggtagctgcggttgaagcaatgaactggcttaagtctgctgctaagctgctggctgctgaggtcaaagataagaagactggagagattcttcgcaagcgttgcgctgtgcattgggtaactcctgatggtttccctgtgtggcaggaatacaagaagcctattcagacgcgcttgaacctgatgttcctcggtcagttccgcttacagcctaccattaacaccaacaaagatagcgagattgatgcacataaacaggagtctggtatcgctcctaactttgtacacagccaagacggtagccaccttcgtaagactgtagtgtgggcacacgagaagtacggaatcgaatcttttgcactgattcacgactccttcggtaccattccggctgacgctgcgaacctgttcaaagcagtgcgcgaaactatggttgacacatatgagtcttgtgatgtactggctgatttctacgaccagttcgctgaccagttgcacgagtctcaattggacaaaatgccagcacttccggctaaaggtaacttgaacctccgtgacatcttagagtcggacttcgcgttcgcg

SEQ ID NO: 526 - protein, 890 aa, synthetic construct
  REGION 1..890: note = Variant of RNA polymerase
MHHHHHHMNTINIAKNDFSDIELAAIPFNTLADHYGEGLAREQLALEHESYEMGEARFRKMFERQLKAGEVADNAAAKPLITTLLPKMIARINDWFEEVKAKRGKRPTAFQFLQVIKPEAVAYITIKTTLACLTSADRTTVQAVASAIGRAIEDEARFGRIRDLEAKHFKKNYEEQLNKRVGHVYKKAFMQVVEADMLSKGLLGGEAWSSWHKEDSIHVGVRCIEMLIESTGMVSLHRQNAGVVGQDSETIELAPEYAEAIATRAGALAGISPMFQPCVVPPKPWTGITGGGYWANGRRPLALVRTHSKKGLMRYEDVYMPEVYKAINIAQNTAWSINKWVLAVANVITKWKHCPVRDIPAIEREELPMKPEDIDMNPEALTAWKRAKAAVYRRDKARKSRRILLEFMLEQANKFANHKAIWFPYNMDWRGRVYAVSMFNPQGNDMTKGLLTLAKGKPIGKEGYYWLKIHGANCAGVDKVPFPERIKFIEENHENIMACAKSPLENTWWAEQDSPFCFLAFCFEYAGVQHHGLSYNCSLPLAFDGSCSGIQHFSAMLRDEVGGRAVNLLPSETVQDIYGIVAKKVNEILQADAINGTDNEVVTVTDENTGEISEKVKLGTKALAGQWLAYGVTRSVTKRSVMTLAYGSKEFGFRQQVLRHTIQWAIDSGKGLMFTQPNQAAGYMAKLIWESVSVTVVAAVEAMNWLKSAAKLLAAEVKDKKTGEILRKRCAVHWVTPDGFPVWQEYKKPIQTRLNLMFLGQFRLQPTINTNKDSEIDAHKQESGIAPNFVHSQDGSHLRKTVVWAHEKYGIESFALIHDSFGTIPADAANLFKAVRETMVDTYESCDVLADFYDQFADQLHESQLDKMPALPAKGNLNLRDILESDFAFA

SEQ ID NO: 527 - DNA, 2670 bp, synthetic construct
  misc_feature 1..2670: note = Variant of RNA polymerase
  source 1..2670: mol_type = other DNA
atgcaccatcaccatcaccatatgaacacgattaacatcgctaagaacgacttctctgacatcgaactggctgctatcccgttcaacactctggctgaccattacggtgagggcttagctcgcgaacagttggcccttgagcatgagtcttacgagatgggtgaagcacgtttccgcaagatgtttgagcgtcaacttaaagctggtgaggttgcggataacgctgccgccaagcctctcatcactaccctactccctaagatgattgcacgcatcaacgactggtttgaggaagtgaaagctaagcgcggcaagcgcccgacagccttccagttcctgcaagaaatcaagccggaagccgtagcgtacatcaccattaagaccactctggcttgctgtaccagtgcggaccgtacaaccgttcaggctgtagcaagcgcaatcggtcaggccattgaggacgaggctcgcttcggtcgtatccgtgaccttgaagctaagcacttcaagaaaaactatgaggaacaactcaacaagcgcgtagggcacgtctacaagaaagcatttatgcaagttgtcgaggctgacatgctctctaagggtctactcggtggcgaggcgtggtcttcgtggcataaggaagactctattcatgtaggagtacgctgcatcgagatgctcattgagtcaaccggaatggttagcttacaccgccaaaatgctggcgtagtaggtcaagactctgagactatcgaactcgcacctgaatacgctgaggctatcgcaacccgtgcaggtgcgctggctggcatctctccgatgttccaaccttgcgtagttcctcctaagccgtggactggcattactggtggtggctattgggctaacggtcgtcgtcctctggcgctggtgcgtactcacagtaagaaaggtctgatgcgctacgaagacgtttacatgcctgaggtgtacaaagcgattaacattgcgcaaaacaccgcctggtcgatcaacaagtgggtcctggcggtcgccaacgtaatcaccaagtggaagcattgtccggtccgggacatccctgcgattgagcgtgaagaactcccgatgaaaccggaagacatcgacatgaatcctgaggctctcaccgcgtggaaacgtgctaaagctgctgtgtaccgcagagacaaggctcgcaagtctcgtcgtatcctgcttgagttcatgcttgagcaagccaataagtttgctaaccataaggccatctggttcccttacaacatggactggcgcggtcgtgtttacgctgtgtcaatgttcaacccgcaaggtaacgatatgaccaaaggactgcttacgctggcgaaaggtaaaccaatcggtaaggaaggttactactggctgaaaatccacggtgcaaactgtgcgggtgtcgataaggttccgttccctgagcgcatcaagttcattgaggaaaaccacgagaacatcatggcttgcgctaagtctccactggagaacacttggtgggctgagcaagatagtccgttctgcttccttgcgttctgctttgagtacgctggggtacagcaccacggcctgagctataactgctcccttccgctggcgtttgacgggtcttgctctggcatccagcacttctccgcgatgctccgagatgaggtaggtggtcgcgcggttaacttgcttcctagtgaaaccgttcaggacatctacgggattgttgctaagaaagtcaacgagattctacaagcagacgcaatcaatgggaccgataacgaagtagttaccgtgaccgatgagaacactggtgaaatctctgagaaagtcaagctgggcactaaggcactggctggtcaatggctggcttacggtgttactcgcagtgtgactaagcgttcagtcatgacgctggcttacgggtccaaagagttcggcttccgtcaacaagtgctgcgccacactattcagtgggctattgattccggcaagggtctgatgttcactcagccgaatcaggctgctggatacatggctaagctgatttgggaatctgtgagcgtgacggtggtagctgcggttgaagcaatgaactggcttaagtctgctgctaagctgctggctgctgaggtcaaagataagaagactggagagattcttcgcaagcgttgcgctgtgcattgggtaactcctgatggtttccctgtgtggcaggaatacaagaagcctattcagacgcgcttgaacctgatgttcctcggtcagttccgcttacagcctaccattaacaccaacaaagatagcgagattgatgcacataaacaggagtctggtatcgctcctaactttgtacacagccaagacggtagccaccttcgtaagactgtagtgtgggcacacgagaagtacggaatcgaatcttttgcactgattcacgactccttcggtaccattccggctgacgctgcgaacctgttcaaagcagtgcgcgaaactatggttgacacatatgagtcttgtgatgtactggctgatttctacgaccagttcgctgaccagttgcacgagtctcaattggacaaaatgccagcacttccggctaaaggtaacttgaacctccgtgacatcttagagtcggacttcgcgttcgcg

SEQ ID NO: 528 - protein, 890 aa, synthetic construct
  REGION 1..890: note = Variant of RNA polymerase
MHHHHHHMNTINIAKNDFSDIELAAIPFNTLADHYGEGLAREQLALEHESYEMGEARFRKMFERQLKAGEVADNAAAKPLITTLLPKMIARINDWFEEVKAKRGKRPTAFQFLQEIKPEAVAYITIKTTLACCTSADRTTVQAVASAIGQAIEDEARFGRIRDLEAKHFKKNYEEQLNKRVGHVYKKAFMQVVEADMLSKGLLGGEAWSSWHKEDSIHVGVRCIEMLIESTGMVSLHRQNAGVVGQDSETIELAPEYAEAIATRAGALAGISPMFQPCVVPPKPWTGITGGGYWANGRRPLALVRTHSKKGLMRYEDVYMPEVYKAINIAQNTAWSINKWVLAVANVITKWKHCPVRDIPAIEREELPMKPEDIDMNPEALTAWKRAKAAVYRRDKARKSRRILLEFMLEQANKFANHKAIWFPYNMDWRGRVYAVSMFNPQGNDMTKGLLTLAKGKPIGKEGYYWLKIHGANCAGVDKVPFPERIKFIEENHENIMACAKSPLENTWWAEQDSPFCFLAFCFEYAGVQHHGLSYNCSLPLAFDGSCSGIQHFSAMLRDEVGGRAVNLLPSETVQDIYGIVAKKVNEILQADAINGTDNEVVTVTDENTGEISEKVKLGTKALAGQWLAYGVTRSVTKRSVMTLAYGSKEFGFRQQVLRHTIQWAIDSGKGLMFTQPNQAAGYMAKLIWESVSVTVVAAVEAMNWLKSAAKLLAAEVKDKKTGEILRKRCAVHWVTPDGFPVWQEYKKPIQTRLNLMFLGQFRLQPTINTNKDSEIDAHKQESGIAPNFVHSQDGSHLRKTVVWAHEKYGIESFALIHDSFGTIPADAANLFKAVRETMVDTYESCDVLADFYDQFADQLHESQLDKMPALPAKGNLNLRDILESDFAFA

SEQ ID NO: 529 - DNA, 2670 bp, synthetic construct
  misc_feature 1..2670: note = Variant of RNA polymerase
  source 1..2670: mol_type = other DNA
atgcaccatcaccatcaccatatgaacacgattaacatcgctaagaacgacttctctgacatcgaactggctgctatcccgttcaacactctggctgaccattacggtgagggcttagctcgcgaacagttggcccttgagcatgagtcttacgagatgggtgaagcacgtttccgcctgatgtttgagcgtcaacttaaagctggtgaggttgcggataacgctgccgccaagcctctcatcactaccctactccctaagatgattgcacgcatcaacgactggtttgaggaagtgaaagctaagcgcggcaagcgcccgacagccttccagttcctgcaagaaatcaagccggaagccgtagcgtacatcaccattaagaccactctggcttgcctaaccagtgcggaccgtacaaccgttcaggctgtagcaagcgcaatcggtcgggccattgaggacgaggctcgcttcggtcgtatccgtgaccttgaagctaagcacttcaagaaaaactatgaggaacaactcaacaagcgcgtagggcacgtctacaagaaagcatttatgcaagttgtcgaggctgacatgctctctaagggtctactcggtggcgaggcgtggtcttcgtggcataaggaagactctattcatgtaggagtacgctgcatcgagatgctcattgagtcaaccggaatggttagcttacaccgccaaaatgctggcgtagtaggtcaagactctgagactatcgaactcgcacctgaatacgctgaggctatcgcaacccgtgcaggtgcgctggctggcatctctccgatgttccaaccttgcgtagttcctcctaagccgtggactggcattactggtggtggctattgggctaacggtcgtcgtcctctggcgctggtgcgtactcacagtaagaaaggtctgatgcgctacgaagacgtttacatgcctgaggtgtacaaagcgattaacattgcgcaaaacaccgcctggtcgatcaacaagtgggtcctggcggtcgccaacgtaatcaccaagtggaagcattgtccggtccgggacatccctgcgattgagcgtgaagaactcccgatgaaaccggaagacatcgacatgaatcctgaggctctcaccgcgtggaaacgtgctaaagctgctgtgtaccgcagagacaaggctcgcaagtctcgtcgtatcctgcttgagttcatgcttgagcaagccaataagtttgctaaccataaggccatctggttcccttacaacatggactggcgcggtcgtgtttacgctgtgtcaatgttcaacccgcaaggtaacgatatgaccaaaggactgcttacgctggcgaaaggtaaaccaatcggtaaggaaggttactactggctgaaaatccacggtgcaaactgtgcgggtgtcgataaggttccgttccctgagcgcatcaagttcattgaggaaaaccacgagaacatcatggcttgcgctaagtctccactggagaacacttggtgggctgagcaagatagtccgttctgcttccttgcgttctgctttgagtacgctggggtacagcaccacggcctgagctataactgctcccttccgctggcgtttgacgggtcttgctctggcatccagcacttctccgcgatgctccgagatgaggtaggtggtcgcgcggttaacttgcttcctagtgaaaccgttcaggacatctacgggattgttgctaagaaagtcaacgagattctacaagcagacgcaatcaatgggaccgataacgaagtagttaccgtgaccgatgagaacactggtgaaatctctgagaaagtcaagctgggcactaaggcactggctggtcaatggctggcttacggtgttactcgcagtgtgactaagcgttcagtcatgacgctggcttacgggtccaaagagttcggcttccgtcaacaagtgctgcgccacactattcagtgggctattgattccggcaagggtctgatgttcactcagccgaatcaggctgctggatacatggctaagctgatttgggaatctgtgagcgtgacggtggtagctgcggttgaagcaatgaactggcttaagtctgctgctaagctgctggctgctgaggtcaaagataagaagactggagagattcttcgcaagcgttgcgctgtgcattgggtaactcctgatggtttccctgtgtggcaggaatacaagaagcctattcagacgcgcttgaacctgatgttcctcggtcagttccgcttacagcctaccattaacaccaacaaagatagcgagattgatgcacataaacaggagtctggtatcgctcctaactttgtacacagccaagacggtagccaccttcgtaagactgtagtgtgggcacacgagaagtacggaatcgaatcttttgcactgattcacgactccttcggtaccattccggctgacgctgcgaacctgttcaaagcagtgcgcgaaactatggttgacacatatgagtcttgtgatgtactggctgatttctacgaccagttcgctgaccagttgcacgagtctcaattggacaaaatgccagcacttccggctaaaggtaacttgaacctccgtgacatcttagagtcggacttcgcgttcgcg

SEQ ID NO: 530 - protein, 890 aa, synthetic construct
  REGION 1..890: note = Variant of RNA polymerase
MHHHHHHMNTINIAKNDFSDIELAAIPFNTLADHYGEGLAREQLALEHESYEMGEARFRLMFERQLKAGEVADNAAAKPLITTLLPKMIARINDWFEEVKAKRGKRPTAFQFLQEIKPEAVAYITIKTTLACLTSADRTTVQAVASAIGRAIEDEARFGRIRDLEAKHFKKNYEEQLNKRVGHVYKKAFMQVVEADMLSKGLLGGEAWSSWHKEDSIHVGVRCIEMLIESTGMVSLHRQNAGVVGQDSETIELAPEYAEAIATRAGALAGISPMFQPCVVPPKPWTGITGGGYWANGRRPLALVRTHSKKGLMRYEDVYMPEVYKAINIAQNTAWSINKWVLAVANVITKWKHCPVRDIPAIEREELPMKPEDIDMNPEALTAWKRAKAAVYRRDKARKSRRILLEFMLEQANKFANHKAIWFPYNMDWRGRVYAVSMFNPQGNDMTKGLLTLAKGKPIGKEGYYWLKIHGANCAGVDKVPFPERIKFIEENHENIMACAKSPLENTWWAEQDSPFCFLAFCFEYAGVQHHGLSYNCSLPLAFDGSCSGIQHFSAMLRDEVGGRAVNLLPSETVQDIYGIVAKKVNEILQADAINGTDNEVVTVTDENTGEISEKVKLGTKALAGQWLAYGVTRSVTKRSVMTLAYGSKEFGFRQQVLRHTIQWAIDSGKGLMFTQPNQAAGYMAKLIWESVSVTVVAAVEAMNWLKSAAKLLAAEVKDKKTGEILRKRCAVHWVTPDGFPVWQEYKKPIQTRLNLMFLGQFRLQPTINTNKDSEIDAHKQESGIAPNFVHSQDGSHLRKTVVWAHEKYGIESFALIHDSFGTIPADAANLFKAVRETMVDTYESCDVLADFYDQFADQLHESQLDKMPALPAKGNLNLRDILESDFAFA

SEQ ID NO: 531 - DNA, 2670 bp, synthetic construct
  misc_feature 1..2670: note = Variant of RNA polymerase
  source 1..2670: mol_type = other DNA
atgcaccatcaccatcaccatatgaacacgattaacatcgctaagaacgacttctctgacatcgaactggctgctatcccgttcaacactctggctgaccattacggtgagggcttagctcgcgaacagttggcccttgagcatgagtcttacgagatgggtgaagcacgtttccgcgggatgtttgagcgtcaacttaaagctggtgaggttgcggataacgctgccgccaagcctctcatcactaccctactccctaagatgattgcacgcatcaacgactggtttgaggaagtgaaagctaagcgcggcaagcgcccgacagccttccagttcctgcaagaaatcaagccggaagccgtagcgtacatcaccattaagaccactctggcttgcctaaccagtgcggaccgtacaaccgttcaggctgtagcaagcgcaatcggtcgggccattgaggacgaggctcgcttcggtcgtatccgtgaccttgaagctaagcacttcaagaaaaactatgaggaacaactcaacaagcgcgtagggcacgtctacaagaaagcatttatgcaagttgtcgaggctgacatgctctctaagggtctactcggtggcgaggcgtggtcttcgtggcataaggaagactctattcatgtaggagtacgctgcatcgagatgctcattgagtcaaccggaatggttagcttacaccgccaaaatgctggcgtagtaggtcaagactctgagactatcgaactcgcacctgaatacgctgaggctatcgcaacccgtgcaggtgcgctggctggcatctctccgatgttccaaccttgcgtagttcctcctaagccgtggactggcattactggtggtggctattgggctaacggtcgtcgtcctctggcgctggtgcgtactcacagtaagaaaggtctgatgcgctacgaagacgtttacatgcctgaggtgtacaaagcgattaacattgcgcaaaacaccgcctggtcgatcaacaagtgggtcctggcggtcgccaacgtaatcaccaagtggaagcattgtccggtccgggacatccctgcgattgagcgtgaagaactcccgatgaaaccggaagacatcgacatgaatcctgaggctctcaccgcgtggaaacgtgctaaagctgctgtgtaccgcagagacaaggctcgcaagtctcgtcgtatcctgcttgagttcatgcttgagcaagccaataagtttgctaaccataaggccatctggttcccttacaacatggactggcgcggtcgtgtttacgctgtgtcaatgttcaacccgcaaggtaacgatatgaccaaaggactgcttacgctggcgaaaggtaaaccaatcggtaaggaaggttactactggctgaaaatccacggtgcaaactgtgcgggtgtcgataaggttccgttccctgagcgcatcaagttcattgaggaaaaccacgagaacatcatggcttgcgctaagtctccactggagaacacttggtgggctgagcaagatagtccgttctgcttccttgcgttctgctttgagtacgctggggtacagcaccacggcctgagctataactgctcccttccgctggcgtttgacgggtcttgctctggcatccagcacttctccgcgatgctccgagatgaggtaggtggtcgcgcggttaacttgcttcctagtgaaaccgttcaggacatctacgggattgttgctaagaaagtcaacgagattctacaagcagacgcaatcaatgggaccgataacgaagtagttaccgtgaccgatgagaacactggtgaaatctctgagaaagtcaagctgggcactaaggcactggctggtcaatggctggcttacggtgttactcgcagtgtgactaagcgttcagtcatgacgctggcttacgggtccaaagagttcggcttccgtcaacaagtgctgcgccacactattcagtgggctattgattccggcaagggtctgatgttcactcagccgaatcaggctgctggatacatggctaagctgatttgggaatctgtgagcgtgacggtggtagctgcggttgaagcaatgaactggcttaagtctgctgctaagctgctggctgctgaggtcaaagataagaagactggagagattcttcgcaagcgttgcgctgtgcattgggtaactcctgatggtttccctgtgtggcaggaatacaagaagcctattcagacgcgcttgaacctgatgttcctcggtcagttccgcttacagcctaccattaacaccaacaaagatagcgagattgatgcacataaacaggagtctggtatcgctcctaactttgtacacagccaagacggtagccaccttcgtaagactgtagtgtgggcacacgagaagtacggaatcgaatcttttgcactgattcacgactccttcggtaccattccggctgacgctgcgaacctgttcaaagcagtgcgcgaaactatggttgacacatatgagtcttgtgatgtactggctgatttctacgaccagttcgctgaccagttgcacgagtctcaattggacaaaatgccagcacttccggctaaaggtaacttgaacctccgtgacatcttagagtcggacttcgcgttcgcg

SEQ ID NO: 532 - protein, 890 aa, synthetic construct
  REGION 1..890: note = Variant of RNA polymerase
MHHHHHHMNTINIAKNDFSDIELAAIPFNTLADHYGEGLAREQLALEHESYEMGEARFRGMFERQLKAGEVADNAAAKPLITTLLPKMIARINDWFEEVKAKRGKRPTAFQFLQEIKPEAVAYITIKTTLACLTSADRTTVQAVASAIGRAIEDEARFGRIRDLEAKHFKKNYEEQLNKRVGHVYKKAFMQVVEADMLSKGLLGGEAWSSWHKEDSIHVGVRCIEMLIESTGMVSLHRQNAGVVGQDSETIELAPEYAEAIATRAGALAGISPMFQPCVVPPKPWTGITGGGYWANGRRPLALVRTHSKKGLMRYEDVYMPEVYKAINIAQNTAWSINKWVLAVANVITKWKHCPVRDIPAIEREELPMKPEDIDMNPEALTAWKRAKAAVYRRDKARKSRRILLEFMLEQANKFANHKAIWFPYNMDWRGRVYAVSMFNPQGNDMTKGLLTLAKGKPIGKEGYYWLKIHGANCAGVDKVPFPERIKFIEENHENIMACAKSPLENTWWAEQDSPFCFLAFCFEYAGVQHHGLSYNCSLPLAFDGSCSGIQHFSAMLRDEVGGRAVNLLPSETVQDIYGIVAKKVNEILQADAINGTDNEVVTVTDENTGEISEKVKLGTKALAGQWLAYGVTRSVTKRSVMTLAYGSKEFGFRQQVLRHTIQWAIDSGKGLMFTQPNQAAGYMAKLIWESVSVTVVAAVEAMNWLKSAAKLLAAEVKDKKTGEILRKRCAVHWVTPDGFPVWQEYKKPIQTRLNLMFLGQFRLQPTINTNKDSEIDAHKQESGIAPNFVHSQDGSHLRKTVVWAHEKYGIESFALIHDSFGTIPADAANLFKAVRETMVDTYESCDVLADFYDQFADQLHESQLDKMPALPAKGNLNLRDILESDFAFA

SEQ ID NO: 533 - DNA, 2670 bp, synthetic construct
  misc_feature 1..2670: note = Variant of RNA polymerase
  source 1..2670: mol_type = other DNA
atgcaccatcaccatcaccatatgaacacgattaacatcgctaagaacgacttctctgacatcgaactggctgctatcccgttcaacactctggtggaccattacggtgagggcttagctcgcgaacagttggcccttgagcatgagtcttacgagatgggtgaagcacgtttccgcaagatgtttgagcgtcaacttaaagctggtgaggttgcggataacgctgccgccaagcctctcatcactaccctactccctaagatgattgcacgcatcaacgactggtttgaggaagtgaaagctaagcgcggcaagcgcccgacagccttccagttcctgcaagaaatcaagccggaagccgtagcgtacatcaccattaagaccactctggcttgcctaaccagtgcggaccgtacaaccgttcaggctgtagcaagcgcaatcggtcgggccattgaggacgaggctcgcttcggtcgtatccgtgaccttgaagctaagcacttcaagaaaaactatgaggaacaactcaacaagcgcgtagggcacgtctacaagaaagcatttatgcaagttgtcgaggctgacatgctctctaagggtctactcggtggcgaggcgtggtcttcgtggcataaggaagactctattcatgtaggagtacgctgcatcgagatgctcattgagtcaaccggaatggttagcttacaccgccaaaatgctggcgtagtaggtcaagactctgagactatcgaactcgcacctgaatacgctgaggctatcgcaacccgtgcaggtgcgctggctggcatctctccgatgttccaaccttgcgtagttcctcctaagccgtggactggcattactggtggtggctattgggctaacggtcgtcgtcctctggcgctggtgcgtactcacagtaagaaaggtctgatgcgctacgaagacgtttacatgcctgaggtgtacaaagcgattaacattgcgcaaaacaccgcctggtcgatcaacaagtgggtcctggcggtcgccaacgtaatcaccaagtggaagcattgtccggtccgggacatccctgcgattgagcgtgaagaactcccgatgaaaccggaagacatcgacatgaatcctgaggctctcaccgcgtggaaacgtgctaaagctgctgtgtaccgcagagacaaggctcgcaagtctcgtcgtatcctgcttgagttcatgcttgagcaagccaataagtttgctaaccataaggccatctggttcccttacaacatggactggcgcggtcgtgtttacgctgtgtcaatgttcaacccgcaaggtaacgatatgaccaaaggactgcttacgctggcgaaaggtaaaccaatcggtaaggaaggttactactggctgaaaatccacggtgcaaactgtgcgggtgtcgataaggttccgttccctgagcgcatcaagttcattgaggaaaaccacgagaacatcatggcttgcgctaagtctccactggagaacacttggtgggctgagcaagatagtccgttctgcttccttgcgttctgctttgagtacgctggggtacagcaccacggcctgagctataactgctcccttccgctggcgtttgacgggtcttgctctggcatccagcacttctccgcgatgctccgagatgaggtaggtggtcgcgcggttaacttgcttcctagtgaaaccgttcaggacatctacgggattgttgctaagaaagtcaacgagattctacaagcagacgcaatcaatgggaccgataacgaagtagttaccgtgaccgatgagaacactggtgaaatctctgagaaagtcaagctgggcactaaggcactggctggtcaatggctggcttacggtgttactcgcagtgtgactaagcgttcagtcatgacgctggcttacgggtccaaagagttcggcttccgtcaacaagtgctgcgccacactattcagtgggctattgattccggcaagggtctgatgttcactcagccgaatcaggctgctggatacatggctaagctgatttgggaatctgtgagcgtgacggtggtagctgcggttgaagcaatgaactggcttaagtctgctgctaagctgctggctgctgaggtcaaagataagaagactggagagattcttcgcaagcgttgcgctgtgcattgggtaactcctgatggtttccctgtgtggcaggaatacaagaagcctattcagacgcgcttgaacctgatgttcctcggtcagttccgcttacagcctaccattaacaccaacaaagatagcgagattgatgcacataaacaggagtctggtatcgctcctaactttgtacacagccaagacggtagccaccttcgtaagactgtagtgtgggcacacgagaagtacggaatcgaatcttttgcactgattcacgactccttcggtaccattccggctgacgctgcgaacctgttcaaagcagtgcgcgaaactatggttgacacatatgagtcttgtgatgtactggctgatttctacgaccagttcgctgaccagttgcacgagtctcaattggacaaaatgccagcacttccggctaaaggtaacttgaacctccgtgacatcttagagtcggacttcgcgttcgcg

SEQ ID NO: 534 - protein, 890 aa, synthetic construct
  REGION 1..890: note = Variant of RNA polymerase
MHHHHHHMNTINIAKNDFSDIELAAIPFNTLVDHYGEGLAREQLALEHESYEMGEARFRKMFERQLKAGEVADNAAAKPLITTLLPKMIARINDWFEEVKAKRGKRPTAFQFLQEIKPEAVAYITIKTTLACLTSADRTTVQAVASAIGRAIEDEARFGRIRDLEAKHFKKNYEEQLNKRVGHVYKKAFMQVVEADMLSKGLLGGEAWSSWHKEDSIHVGVRCIEMLIESTGMVSLHRQNAGVVGQDSETIELAPEYAEAIATRAGALAGISPMFQPCVVPPKPWTGITGGGYWANGRRPLALVRTHSKKGLMRYEDVYMPEVYKAINIAQNTAWSINKWVLAVANVITKWKHCPVRDIPAIEREELPMKPEDIDMNPEALTAWKRAKAAVYRRDKARKSRRILLEFMLEQANKFANHKAIWFPYNMDWRGRVYAVSMFNPQGNDMTKGLLTLAKGKPIGKEGYYWLKIHGANCAGVDKVPFPERIKFIEENHENIMACAKSPLENTWWAEQDSPFCFLAFCFEYAGVQHHGLSYNCSLPLAFDGSCSGIQHFSAMLRDEVGGRAVNLLPSETVQDIYGIVAKKVNEILQADAINGTDNEVVTVTDENTGEISEKVKLGTKALAGQWLAYGVTRSVTKRSVMTLAYGSKEFGFRQQVLRHTIQWAIDSGKGLMFTQPNQAAGYMAKLIWESVSVTVVAAVEAMNWLKSAAKLLAAEVKDKKTGEILRKRCAVHWVTPDGFPVWQEYKKPIQTRLNLMFLGQFRLQPTINTNKDSEIDAHKQESGIAPNFVHSQDGSHLRKTVVWAHEKYGIESFALIHDSFGTIPADAANLFKAVRETMVDTYESCDVLADFYDQFADQLHESQLDKMPALPAKGNLNLRDILESDFAFA

SEQ ID NO: 535 - DNA, 2670 bp, synthetic construct
  misc_feature 1..2670: note = Variant of RNA polymerase
  source 1..2670: mol_type = other DNA
atgcaccatcaccatcaccatatgaacacgattaacatcgctaagaacgacttctctgacatcgaactggctgctatcccgttcaacactctggctgaccattacggtgagggcttagctcgcgaacagttggcccttgagcatgagtcttacgagatgggtgaagcacgtttccgcaagatgtttgagcgtcaacttaaagctggtgaggttgcggataacgctgccgccaagcctctcatcactaccctactccctaagatgattgcacgcatcaacgactggtttgaggaagtgaaagctaagcgcggcaagcgcccgacagccttccagttcctgcaagaaatcaagccggaagccgtagcgtacatcaccattaagaccactctggcttgcctaaccagtgcggaccgtacaaccgttcaggctgtagcaagcgcaatcggtcgggccattgaggacgaggctcgcttcggtcgtatccgtgaccttgaagctaagcacttcaagaaaaactatgaggaacaactcaacaagcgcgtagggcacgtctacaagaaagcatttatgcaagttgtcgaggctgacatgctctctaagggtctactcggtggcgaggcgtggtcttcgtggcataaggaagactctattcatgtaggagtacgctgcatcgagatgctcattgagtcaaccggaatggttagcttacaccgccaaaatgctggcgtagtaggtcaagactctgagactatcgaactcgcacctgaatacgctgaggctatcgcaacccgtgcaggtgcgctggctggcatctctccgatggcgcaaccttgcgtagttcctcctaagccgtggactggcattactggtggtggctattgggctaacggtcgtcgtcctctggcgctggtgcgtactcacagtaagaaaggtctgatgcgctacgaagacgtttacatgcctgaggtgtacaaagcgattaacattgcgcaaaacaccgcctggtcgatcaacaagtgggtcctggcggtcgccaacgtaatcaccaagtggaagcattgtccggtccgggacatccctgcgattgagcgtgaagaactcccgatgaaaccggaagacatcgacatgaatcctgaggctctcaccgcgtggaaacgtgctaaagctgctgtgtaccgcagagacaaggctcgcaagtctcgtcgtatcctgcttgagttcatgcttgagcaagccaataagtttgctaaccataaggccatctggttcccttacaacatggactggcgcggtcgtgtttacgctgtgtcaatgttcaacccgcaaggtaacgatatgaccaaaggactgcttacgctggcgaaaggtaaaccaatcggtaaggaaggttactactggctgaaaatccacggtgcaaactgtgcgggtgtcgataaggttccgttccctgagcgcatcaagttcattgaggaaaaccacgagaacatcatggcttgcgctaagtctccactggagaacacttggtgggctgagcaagatagtccgttctgcttccttgcgttctgctttgagtacgctggggtacagcaccacggcctgagctataactgctcccttccgctggcgtttgacgggtcttgctctggcatccagcacttctccgcgatgctccgagatgaggtaggtggtcgcgcggttaacttgcttcctagtgaaaccgttcaggacatctacgggattgttgctaagaaagtcaacgagattctacaagcagacgcaatcaatgggaccgataacgaagtagttaccgtgaccgatgagaacactggtgaaatctctgagaaagtcaagctgggcactaaggcactggctggtcaatggctggcttacggtgttactcgcagtgtgactaagcgttcagtcatgacgctggcttacgggtccaaagagttcggcttccgtcaacaagtgctgcgccacactattcagtgggctattgattccggcaagggtctgatgttcactcagccgaatcaggctgctggatacatggctaagctgatttgggaatctgtgagcgtgacggtggtagctgcggttgaagcaatgaactggcttaagtctgctgctaagctgctggctgctgaggtcaaagataagaagactggagagattcttcgcaagcgttgcgctgtgcattgggtaactcctgatggtttccctgtgtggcaggaatacaagaagcctattcagacgcgcttgaacctgatgttcctcggtcagttccgcttacagcctaccattaacaccaacaaagatagcgagattgatgcacataaacaggagtctggtatcgctcctaactttgtacacagccaagacggtagccaccttcgtaagactgtagtgtgggcacacgagaagtacggaatcgaatcttttgcactgattcacgactccttcggtaccattccggctgacgctgcgaacctgttcaaagcagtgcgcgaaactatggttgacacatatgagtcttgtgatgtactggctgatttctacgaccagttcgctgaccagttgcacgagtctcaattggacaaaatgccagcacttccggctaaaggtaacttgaacctccgtgacatcttagagtcggacttcgcgttcgcg

SEQ ID NO: 536 - protein, 890 aa, synthetic construct
  REGION 1..890: note = Variant of RNA polymerase
MHHHHHHMNTINIAKNDFSDIELAAIPFNTLADHYGEGLAREQLALEHESYEMGEARFRKMFERQLKAGEVADNAAAKPLITTLLPKMIARINDWFEEVKAKRGKRPTAFQFLQEIKPEAVAYITIKTTLACLTSADRTTVQAVASAIGRAIEDEARFGRIRDLEAKHFKKNYEEQLNKRVGHVYKKAFMQVVEADMLSKGLLGGEAWSSWHKEDSIHVGVRCIEMLIESTGMVSLHRQNAGVVGQDSETIELAPEYAEAIATRAGALAGISPMAQPCVVPPKPWTGITGGGYWANGRRPLALVRTHSKKGLMRYEDVYMPEVYKAINIAQNTAWSINKWVLAVANVITKWKHCPVRDIPAIEREELPMKPEDIDMNPEALTAWKRAKAAVYRRDKARKSRRILLEFMLEQANKFANHKAIWFPYNMDWRGRVYAVSMFNPQGNDMTKGLLTLAKGKPIGKEGYYWLKIHGANCAGVDKVPFPERIKFIEENHENIMACAKSPLENTWWAEQDSPFCFLAFCFEYAGVQHHGLSYNCSLPLAFDGSCSGIQHFSAMLRDEVGGRAVNLLPSETVQDIYGIVAKKVNEILQADAINGTDNEVVTVTDENTGEISEKVKLGTKALAGQWLAYGVTRSVTKRSVMTLAYGSKEFGFRQQVLRHTIQWAIDSGKGLMFTQPNQAAGYMAKLIWESVSVTVVAAVEAMNWLKSAAKLLAAEVKDKKTGEILRKRCAVHWVTPDGFPVWQEYKKPIQTRLNLMFLGQFRLQPTINTNKDSEIDAHKQESGIAPNFVHSQDGSHLRKTVVWAHEKYGIESFALIHDSFGTIPADAANLFKAVRETMVDTYESCDVLADFYDQFADQLHESQLDKMPALPAKGNLNLRDILESDFAFA

SEQ ID NO: 537 - DNA, 2670 bp, synthetic construct
  misc_feature 1..2670: note = Variant of RNA polymerase
  source 1..2670: mol_type = other DNA
atgcaccatcaccatcaccatatgaacacgattaacatcgctaagaacgacttctctgacatcgaactggctgctatcccgttcaacactctggctgaccattacggtgagggcttagctcgcgaacagttggcccttgagcatgagtcttacgagatgggtgaagcacgtttccgcaagatgtttgagcgtcaacttaaagctggtgaggttgcggataacgctgccgccaagcctctcatcactaccctactccctaagatgcaggcacgcatcaacgactggtttgaggaagtgaaagctaagcgcggcaagcgcccgacagccttccagttcctgcaagaaatcaagccggaagccgtagcgtacatcaccattaagaccactctggcttgcctaaccagtgcggaccgtacaaccgttcaggctgtagcaagcgcaatcggtcgggccattgaggacgaggctcgcttcggtcgtatccgtgaccttgaagctaagcacttcaagaaaaactatgaggaacaactcaacaagcgcgtagggcacgtctacaagaaagcatttatgcaagttgtcgaggctgacatgctctctaagggtctactcggtggcgaggcgtggtcttcgtggcataaggaagactctattcatgtaggagtacgctgcatcgagatgctcattgagtcaaccggaatggttagcttacaccgccaaaatgctggcgtagtaggtcaagactctgagactatcgaactcgcacctgaatacgctgaggctatcgcaacccgtgcaggtgcgctggctggcatctctccgatgttccaaccttgcgtagttcctcctaagccgtggactggcattactggtggtggctattgggctaacggtcgtcgtcctctggcgctggtgcgtactcacagtaagaaaggtctgatgcgctacgaagacgtttacatgcctgaggtgtacaaagcgattaacattgcgcaaaacaccgcctggtcgatcaacaagtgggtcctggcggtcgccaacgtaatcaccaagtggaagcattgtccggtccgggacatccctgcgattgagcgtgaagaactcccgatgaaaccggaagacatcgacatgaatcctgaggctctcaccgcgtggaaacgtgctaaagctgctgtgtaccgcagagacaaggctcgcaagtctcgtcgtatcctgcttgagttcatgcttgagcaagccaataagtttgctaaccataaggccatctggttcccttacaacatggactggcgcggtcgtgtttacgctgtgtcaatgttcaacccgcaaggtaacgatatgaccaaaggactgcttacgctggcgaaaggtaaaccaatcggtaaggaaggttactactggctgaaaatccacggtgcaaactgtgcgggtgtcgataaggttccgttccctgagcgcatcaagttcattgaggaaaaccacgagaacatcatggcttgcgctaagtctccactggagaacacttggtgggctgagcaagatagtccgttctgcttccttgcgttctgctttgagtacgctggggtacagcaccacggcctgagctataactgctcccttccgctggcgtttgacgggtcttgctctggcatccagcacttctccgcgatgctccgagatgaggtaggtggtcgcgcggttaacttgcttcctagtgaaaccgttcaggacatctacgggattgttgctaagaaagtcaacgagattctacaagcagacgcaatcaatgggaccgataacgaagtagttaccgtgaccgatgagaacactggtgaaatctctgagaaagtcaagctgggcactaaggcactggctggtcaatggctggcttacggtgttactcgcagtgtgactaagcgttcagtcatgacgctggcttacgggtccaaagagttcggcttccgtcaacaagtgctgcgccacactattcagtgggctattgattccggcaagggtctgatgttcactcagccgaatcaggctgctggatacatggctaagctgatttgggaatctgtgagcgtgacggtggtagctgcggttgaagcaatgaactggcttaagtctgctgctaagctgctggctgctgaggtcaaagataagaagactggagagattcttcgcaagcgttgcgctgtgcattgggtaactcctgatggtttccctgtgtggcaggaatacaagaagcctattcagacgcgcttgaacctgatgttcctcggtcagttccgcttacagcctaccattaacaccaacaaagatagcgagattgatgcacataaacaggagtctggtatcgctcctaactttgtacacagccaagacggtagccaccttcgtaagactgtagtgtgggcacacgagaagtacggaatcgaatcttttgcactgattcacgactccttcggtaccattccggctgacgctgcgaacctgttcaaagcagtgcgcgaaactatggttgacacatatgagtcttgtgatgtactggctgatttctacgaccagttcgctgaccagttgcacgagtctcaattggacaaaatgccagcacttccggctaaaggtaacttgaacctccgtgacatcttagagtcggacttcgcgttcgcg

SEQ ID NO: 538 - protein, 890 aa, synthetic construct
  REGION 1..890: note = Variant of RNA polymerase
MHHHHHHMNTINIAKNDFSDIELAAIPFNTLADHYGEGLAREQLALEHESYEMGEARFRKMFERQLKAGEVADNAAAKPLITTLLPKMQARINDWFEEVKAKRGKRPTAFQFLQEIKPEAVAYITIKTTLACLTSADRTTVQAVASAIGRAIEDEARFGRIRDLEAKHFKKNYEEQLNKRVGHVYKKAFMQVVEADMLSKGLLGGEAWSSWHKEDSIHVGVRCIEMLIESTGMVSLHRQNAGVVGQDSETIELAPEYAEAIATRAGALAGISPMFQPCVVPPKPWTGITGGGYWANGRRPLALVRTHSKKGLMRYEDVYMPEVYKAINIAQNTAWSINKWVLAVANVITKWKHCPVRDIPAIEREELPMKPEDIDMNPEALTAWKRAKAAVYRRDKARKSRRILLEFMLEQANKFANHKAIWFPYNMDWRGRVYAVSMFNPQGNDMTKGLLTLAKGKPIGKEGYYWLKIHGANCAGVDKVPFPERIKFIEENHENIMACAKSPLENTWWAEQDSPFCFLAFCFEYAGVQHHGLSYNCSLPLAFDGSCSGIQHFSAMLRDEVGGRAVNLLPSETVQDIYGIVAKKVNEILQADAINGTDNEVVTVTDENTGEISEKVKLGTKALAGQWLAYGVTRSVTKRSVMTLAYGSKEFGFRQQVLRHTIQWAIDSGKGLMFTQPNQAAGYMAKLIWESVSVTVVAAVEAMNWLKSAAKLLAAEVKDKKTGEILRKRCAVHWVTPDGFPVWQEYKKPIQTRLNLMFLGQFRLQPTINTNKDSEIDAHKQESGIAPNFVHSQDGSHLRKTVVWAHEKYGIESFALIHDSFGTIPADAANLFKAVRETMVDTYESCDVLADFYDQFADQLHESQLDKMPALPAKGNLNLRDILESDFAFA

SEQ ID NO: 539 - DNA, 2670 bp, synthetic construct
  misc_feature 1..2670: note = Variant of RNA polymerase
  source 1..2670: mol_type = other DNA
atgcaccatcaccatcaccatatgaacacgattaacatcgctaagaacgacttctctgacatcgaactggctgctatcccgttcaacactctggctgaccattacggtgagggcttagctcgcgaacagttggcccttgagcatgagtcttacgagatgggtgaagcacgtttccgcaagatgtttgagcgtcaacttaaagctggtgaggttgcggataacgctgccgccaagcctctcatcactaccctactccctaagatgattgcacgcatcaacgactggtttgaggaagtgaaagctaagcgcggcaagcgcccgacagccttccagttcctgcaagaaatcaagccggaagccgtagcgtacatcaccattaagaccactctggcttgcctaaccagtgcggaccgtacaaccgttcaggctgtagcaagcgcaatcggtcgggccattgaggacgaggctcgcttcggtcgtatccgtgaccttgaagctaagcacttcaagaaaaactatgaggaacaactcaacaagcgcgtagggcacgtctacaagaaagcatttatgcaagttgtcgaggctgacatgctctctaagggtctactcggtggcgaggcgtggtcttcgtggcataaggaagactctattcatgtaggagtacgctgcatcgagatgctcattgagtcaaccggaatggttagcttacaccgccaaaatgctggcgtagtaggtcaagactctgagactatcgaactcgcacctgaagtggctgaggctatcgcaacccgtgcaggtgcgctggctggcatctctccgatgttccaaccttgcgtagttcctcctaagccgtggactggcattactggtggtggctattgggctaacggtcgtcgtcctctggcgctggtgcgtactcacagtaagaaaggtctgatgcgctacgaagacgtttacatgcctgaggtgtacaaagcgattaacattgcgcaaaacaccgcctggtcgatcaacaagtgggtcctggcggtcgccaacgtaatcaccaagtggaagcattgtccggtccgggacatccctgcgattgagcgtgaagaactcccgatgaaaccggaagacatcgacatgaatcctgaggctctcaccgcgtggaaacgtgctaaagctgctgtgtaccgcagagacaaggctcgcaagtctcgtcgtatcctgcttgagttcatgcttgagcaagccaataagtttgctaaccataaggccatctggttcccttacaacatggactggcgcggtcgtgtttacgctgtgtcaatgttcaacccgcaaggtaacgatatgaccaaaggactgcttacgctggcgaaaggtaaaccaatcggtaaggaaggttactactggctgaaaatccacggtgcaaactgtgcgggtgtcgataaggttccgttccctgagcgcatcaagttcattgaggaaaaccacgagaacatcatggcttgcgctaagtctccactggagaacacttggtgggctgagcaagatagtccgttctgcttccttgcgttctgctttgagtacgctggggtacagcaccacggcctgagctataactgctcccttccgctggcgtttgacgggtcttgctctggcatccagcacttctccgcgatgctccgagatgaggtaggtggtcgcgcggttaacttgcttcctagtgaaaccgttcaggacatctacgggattgttgctaagaaagtcaacgagattctacaagcagacgcaatcaatgggaccgataacgaagtagttaccgtgaccgatgagaacactggtgaaatctctgagaaagtcaagctgggcactaaggcactggctggtcaatggctggcttacggtgttactcgcagtgtgactaagcgttcagtcatgacgctggcttacgggtccaaagagttcggcttccgtcaacaagtgctgcgccacactattcagtgggctattgattccggcaagggtctgatgttcactcagccgaatcaggctgctggatacatggctaagctgatttgggaatctgtgagcgtgacggtggtagctgcggttgaagcaatgaactggcttaagtctgctgctaagctgctggctgctgaggtcaaagataagaagactggagagattcttcgcaagcgttgcgctgtgcattgggtaactcctgatggtttccctgtgtggcaggaatacaagaagcctattcagacgcgcttgaacctgatgttcctcggtcagttccgcttacagcctaccattaacaccaacaaagatagcgagattgatgcacataaacaggagtctggtatcgctcctaactttgtacacagccaagacggtagccaccttcgtaagactgtagtgtgggcacacgagaagtacggaatcgaatcttttgcactgattcacgactccttcggtaccattccggctgacgctgcgaacctgttcaaagcagtgcgcgaaactatggttgacacatatgagtcttgtgatgtactggctgatttctacgaccagttcgctgaccagttgcacgagtctcaattggacaaaatgccagcacttccggctaaaggtaacttgaacctccgtgacatcttagagtcggacttcgcgttcgcg

SEQ ID NO: 540 - protein, 890 aa, synthetic construct
  REGION 1..890: note = Variant of RNA polymerase
MHHHHHHMNTINIAKNDFSDIELAAIPFNTLADHYGEGLAREQLALEHESYEMGEARFRKMFERQLKAGEVADNAAAKPLITTLLPKMIARINDWFEEVKAKRGKRPTAFQFLQEIKPEAVAYITIKTTLACLTSADRTTVQAVASAIGRAIEDEARFGRIRDLEAKHFKKNYEEQLNKRVGHVYKKAFMQVVEADMLSKGLLGGEAWSSWHKEDSIHVGVRCIEMLIESTGMVSLHRQNAGVVGQDSETIELAPEVAEAIATRAGALAGISPMFQPCVVPPKPWTGITGGGYWANGRRPLALVRTHSKKGLMRYEDVYMPEVYKAINIAQNTAWSINKWVLAVANVITKWKHCPVRDIPAIEREELPMKPEDIDMNPEALTAWKRAKAAVYRRDKARKSRRILLEFMLEQANKFANHKAIWFPYNMDWRGRVYAVSMFNPQGNDMTKGLLTLAKGKPIGKEGYYWLKIHGANCAGVDKVPFPERIKFIEENHENIMACAKSPLENTWWAEQDSPFCFLAFCFEYAGVQHHGLSYNCSLPLAFDGSCSGIQHFSAMLRDEVGGRAVNLLPSETVQDIYGIVAKKVNEILQADAINGTDNEVVTVTDENTGEISEKVKLGTKALAGQWLAYGVTRSVTKRSVMTLAYGSKEFGFRQQVLRHTIQWAIDSGKGLMFTQPNQAAGYMAKLIWESVSVTVVAAVEAMNWLKSAAKLLAAEVKDKKTGEILRKRCAVHWVTPDGFPVWQEYKKPIQTRLNLMFLGQFRLQPTINTNKDSEIDAHKQESGIAPNFVHSQDGSHLRKTVVWAHEKYGIESFALIHDSFGTIPADAANLFKAVRETMVDTYESCDVLADFYDQFADQLHESQLDKMPALPAKGNLNLRDILESDFAFA

SEQ ID NO: 541 - DNA, 2670 bp, synthetic construct
  misc_feature 1..2670: note = Variant of RNA polymerase
  source 1..2670: mol_type = other DNA
atgcaccatcaccatcaccatatgaacacgattaacatcgctaagaacgacttctctgacatcgaactggctgctatcccgttcaacactctggctgaccattacggtgagggcttagctcgcgaacagttggcccttgagcatgagtcttacgagatgggtgaagcacgtttccgcaagatgtttgagcgtcaacttaaagctggtgaggttgcggataacgctgccgccaagcctctcatcactaccctactccctaagatgattgcacgcatcaacgactggtttgaggaagtgaaagctaagcgcggcaagcgcccgacagccttccagttcctgcaagaaatcaagccggaagccgtagcgtacatcaccattaagaccactctggcttgcctaaccagtgcggaccgtacaaccgttcaggctgtagcaagcgcaatcggtcgggccattgaggacgaggctcgcttcggtcgtatccgtgaccttgaagctaagcacttcaagaaaaactatgaggaacaactcaacaagcgcgtagggcacgtctacaagaaagcatttatgcaagttgtcgaggctgacatgctctctaagggtctactcggtggcgaggcgtggtcttcgtggcataaggaagactctattcatgtaggagtacgctgcatcgagatgctcattgagtcaaccggaatggttagcttacaccgccaaaatgctggcgtagtaggtcaagactctgagactatcgaactcgcacctgaatacgctgaggctatcgcaacccgtgcaggtgcgctggctggcatctctccgctgttccaaccttgcgtagttcctcctaagccgtggactggcattactggtggtggctattgggctaacggtcgtcgtcctctggcgctggtgcgtactcacagtaagaaaggtctgatgcgctacgaagacgtttacatgcctgaggtgtacaaagcgattaacattgcgcaaaacaccgcctggtcgatcaacaagtgggtcctggcggtcgccaacgtaatcaccaagtggaagcattgtccggtccgggacatccctgcgattgagcgtgaagaactcccgatgaaaccggaagacatcgacatgaatcctgaggctctcaccgcgtggaaacgtgctaaagctgctgtgtaccgcagagacaaggctcgcaagtctcgtcgtatcctgcttgagttcatgcttgagcaagccaataagtttgctaaccataaggccatctggttcccttacaacatggactggcgcggtcgtgtttacgctgtgtcaatgttcaacccgcaaggtaacgatatgaccaaaggactgcttacgctggcgaaaggtaaaccaatcggtaaggaaggttactactggctgaaaatccacggtgcaaactgtgcgggtgtcgataaggttccgttccctgagcgcatcaagttcattgaggaaaaccacgagaacatcatggcttgcgctaagtctccactggagaacacttggtgggctgagcaagatagtccgttctgcttccttgcgttctgctttgagtacgctggggtacagcaccacggcctgagctataactgctcccttccgctggcgtttgacgggtcttgctctggcatccagcacttctccgcgatgctccgagatgaggtaggtggtcgcgcggttaacttgcttcctagtgaaaccgttcaggacatctacgggattgttgctaagaaagtcaacgagattctacaagcagacgcaatcaatgggaccgataacgaagtagttaccgtgaccgatgagaacactggtgaaatctctgagaaagtcaagctgggcactaaggcactggctggtcaatggctggcttacggtgttactcgcagtgtgactaagcgttcagtcatgacgctggcttacgggtccaaagagttcggcttccgtcaacaagtgctgcgccacactattcagtgggctattgattccggcaagggtctgatgttcactcagccgaatcaggctgctggatacatggctaagctgatttgggaatctgtgagcgtgacggtggtagctgcggttgaagcaatgaactggcttaagtctgctgctaagctgctggctgctgaggtcaaagataagaagactggagagattcttcgcaagcgttgcgctgtgcattgggtaactcctgatggtttccctgtgtggcaggaatacaagaagcctattcagacgcgcttgaacctgatgttcctcggtcagttccgcttacagcctaccattaacaccaacaaagatagcgagattgatgcacataaacaggagtctggtatcgctcctaactttgtacacagccaagacggtagccaccttcgtaagactgtagtgtgggcacacgagaagtacggaatcgaatcttttgcactgattcacgactccttcggtaccattccggctgacgctgcgaacctgttcaaagcagtgcgcgaaactatggttgacacatatgagtcttgtgatgtactggctgatttctacgaccagttcgctgaccagttgcacgagtctcaattggacaaaatgccagcacttccggctaaaggtaacttgaacctccgtgacatcttagagtcggacttcgcgttcgcg

SEQ ID NO: 542 - protein, 890 aa, synthetic construct
  REGION 1..890: note = Variant of RNA polymerase
MHHHHHHMNTINIAKNDFSDIELAAIPFNTLADHYGEGLAREQLALEHESYEMGEARFRKMFERQLKAGEVADNAAAKPLITTLLPKMIARINDWFEEVKAKRGKRPTAFQFLQEIKPEAVAYITIKTTLACLTSADRTTVQAVASAIGRAIEDEARFGRIRDLEAKHFKKNYEEQLNKRVGHVYKKAFMQVVEADMLSKGLLGGEAWSSWHKEDSIHVGVRCIEMLIESTGMVSLHRQNAGVVGQDSETIELAPEYAEAIATRAGALAGISPLFQPCVVPPKPWTGITGGGYWANGRRPLALVRTHSKKGLMRYEDVYMPEVYKAINIAQNTAWSINKWVLAVANVITKWKHCPVRDIPAIEREELPMKPEDIDMNPEALTAWKRAKAAVYRRDKARKSRRILLEFMLEQANKFANHKAIWFPYNMDWRGRVYAVSMFNPQGNDMTKGLLTLAKGKPIGKEGYYWLKIHGANCAGVDKVPFPERIKFIEENHENIMACAKSPLENTWWAEQDSPFCFLAFCFEYAGVQHHGLSYNCSLPLAFDGSCSGIQHFSAMLRDEVGGRAVNLLPSETVQDIYGIVAKKVNEILQADAINGTDNEVVTVTDENTGEISEKVKLGTKALAGQWLAYGVTRSVTKRSVMTLAYGSKEFGFRQQVLRHTIQWAIDSGKGLMFTQPNQAAGYMAKLIWESVSVTVVAAVEAMNWLKSAAKLLAAEVKDKKTGEILRKRCAVHWVTPDGFPVWQEYKKPIQTRLNLMFLGQFRLQPTINTNKDSEIDAHKQESGIAPNFVHSQDGSHLRKTVVWAHEKYGIESFALIHDSFGTIPADAANLFKAVRETMVDTYESCDVLADFYDQFADQLHESQLDKMPALPAKGNLNLRDILESDFAFA

SEQ ID NO: 543 - DNA, 2670 bp, synthetic construct
  misc_feature 1..2670: note = Variant of RNA polymerase
  source 1..2670: mol_type = other DNA
atgcaccatcaccatcaccatatgaacacgattaacatcgctactaacgacttctctgacatcgaactggctgctatcccgttcaacactctggctgaccattacggtgagggcttagctcgcgaacagttggcccttgagcatgagtcttacgagatgggtgaagcacgtttccgcaagatgtttgagcgtcaacttaaagctggtgaggttgcggataacgctgccgccaagcctctcatcactaccctactccctaagatgattgcacgcatcaacgactggtttgaggaagtgaaagctaagcgcggcaagcgcccgacagccttccagttcctgcaagaaatcaagccggaagccgtagcgtacatcaccattaagaccactctggcttgcctaaccagtgcggaccgtacaaccgttcaggctgtagcaagcgcaatcggtcgggccattgaggacgaggctcgcttcggtcgtatccgtgaccttgaagctaagcacttcaagaaaaactatgaggaacaactcaacaagcgcgtagggcacgtctacaagaaagcatttatgcaagttgtcgaggctgacatgctctctaagggtctactcggtggcgaggcgtggtcttcgtggcataaggaagactctattcatgtaggagtacgctgcatcgagatgctcattgagtcaaccggaatggttagcttacaccgccaaaatgctggcgtagtaggtcaagactctgagactatcgaactcgcacctgaatacgctgaggctatcgcaacccgtgcaggtgcgctggctggcatctctccgatgttccaaccttgcgtagttcctcctaagccgtggactggcattactggtggtggctattgggctaacggtcgtcgtcctctggcgctggtgcgtactcacagtaagaaaggtctgatgcgctacgaagacgtttacatgcctgaggtgtacaaagcgattaacattgcgcaaaacaccgcctggtcgatcaacaagtgggtcctggcggtcgccaacgtaatcaccaagtggaagcattgtccggtccgggacatccctgcgattgagcgtgaagaactcccgatgaaaccggaagacatcgacatgaatcctgaggctctcaccgcgtggaaacgtgctaaagctgctgtgtaccgcagagacaaggctcgcaagtctcgtcgtatcctgcttgagttcatgcttgagcaagccaataagtttgctaaccataaggccatctggttcccttacaacatggactggcgcggtcgtgtttacgctgtgtcaatgttcaacccgcaaggtaacgatatgaccaaaggactgcttacgctggcgaaaggtaaaccaatcggtaaggaaggttactactggctgaaaatccacggtgcaaactgtgcgggtgtcgataaggttccgttccctgagcgcatcaagttcattgaggaaaaccacgagaacatcatggcttgcgctaagtctccactggagaacacttggtgggctgagcaagatagtccgttctgcttccttgcgttctgctttgagtacgctggggtacagcaccacggcctgagctataactgctcccttccgctggcgtttgacgggtcttgctctggcatccagcacttctccgcgatgctccgagatgaggtaggtggtcgcgcggttaacttgcttcctagtgaaaccgttcaggacatctacgggattgttgctaagaaagtcaacgagattctacaagcagacgcaatcaatgggaccgataacgaagtagttaccgtgaccgatgagaacactggtgaaatctctgagaaagtcaagctgggcactaaggcactggctggtcaatggctggcttacggtgttactcgcagtgtgactaagcgttcagtcatgacgctggcttacgggtccaaagagttcggcttccgtcaacaagtgctgcgccacactattcagtgggctattgattccggcaagggtctgatgttcactcagccgaatcaggctgctggatacatggctaagctgatttgggaatctgtgagcgtgacggtggtagctgcggttgaagcaatgaactggcttaagtctgctgctaagctgctggctgctgaggtcaaagataagaagactggagagattcttcgcaagcgttgcgctgtgcattgggtaactcctgatggtttccctgtgtggcaggaatacaagaagcctattcagacgcgcttgaacctgatgttcctcggtcagttccgcttacagcctaccattaacaccaacaaagatagcgagattgatgcacataaacaggagtctggtatcgctcctaactttgtacacagccaagacggtagccaccttcgtaagactgtagtgtgggcacacgagaagtacggaatcgaatcttttgcactgattcacgactccttcggtaccattccggctgacgctgcgaacctgttcaaagcagtgcgcgaaactatggttgacacatatgagtcttgtgatgtactggctgatttctacgaccagttcgctgaccagttgcacgagtctcaattggacaaaatgccagcacttccggctaaaggtaacttgaacctccgtgacatcttagagtcggacttcgcgttcgcg

SEQ ID NO: 544 - protein, 890 aa, synthetic construct
  REGION 1..890: note = Variant of RNA polymerase
MHHHHHHMNTINIATNDFSDIELAAIPFNTLADHYGEGLAREQLALEHESYEMGEARFRKMFERQLKAGEVADNAAAKPLITTLLPKMIARINDWFEEVKAKRGKRPTAFQFLQEIKPEAVAYITIKTTLACLTSADRTTVQAVASAIGRAIEDEARFGRIRDLEAKHFKKNYEEQLNKRVGHVYKKAFMQVVEADMLSKGLLGGEAWSSWHKEDSIHVGVRCIEMLIESTGMVSLHRQNAGVVGQDSETIELAPEYAEAIATRAGALAGISPMFQPCVVPPKPWTGITGGGYWANGRRPLALVRTHSKKGLMRYEDVYMPEVYKAINIAQNTAWSINKWVLAVANVITKWKHCPVRDIPAIEREELPMKPEDIDMNPEALTAWKRAKAAVYRRDKARKSRRILLEFMLEQANKFANHKAIWFPYNMDWRGRVYAVSMFNPQGNDMTKGLLTLAKGKPIGKEGYYWLKIHGANCAGVDKVPFPERIKFIEENHENIMACAKSPLENTWWAEQDSPFCFLAFCFEYAGVQHHGLSYNCSLPLAFDGSCSGIQHFSAMLRDEVGGRAVNLLPSETVQDIYGIVAKKVNEILQADAINGTDNEVVTVTDENTGEISEKVKLGTKALAGQWLAYGVTRSVTKRSVMTLAYGSKEFGFRQQVLRHTIQWAIDSGKGLMFTQPNQAAGYMAKLIWESVSVTVVAAVEAMNWLKSAAKLLAAEVKDKKTGEILRKRCAVHWVTPDGFPVWQEYKKPIQTRLNLMFLGQFRLQPTINTNKDSEIDAHKQESGIAPNFVHSQDGSHLRKTVVWAHEKYGIESFALIHDSFGTIPADAANLFKAVRETMVDTYESCDVLADFYDQFADQLHESQLDKMPALPAKGNLNLRDILESDFAFA

SEQ ID NO: 545 - DNA, 2670 bp, synthetic construct
  misc_feature 1..2670: note = Variant of RNA polymerase
  source 1..2670: mol_type = other DNA
atgcaccatcaccatcaccatatgaacacgattaacatcgctaagaacgacttctctgacatcgaactggctgctatcccgttcaacactctggctgaccattacggtgagggcttagctcgcgaacagttggcccttgagcatgagtcttacgagatgggtgaagcacgtttccgcaagatgtttgagcgtcaacttaaagctggtgaggttgcggataacgctgccgccaagcctctcatcactaccctactccctaagatgattgcacgcatcaacgactggtttgaggaagtgaaagctaagcgcggcaagcgcccgacagccttccagttcctgcaagaaatcaagccggaagccgtagcgtacatcaccattaagaccactctggcttgcctaaccagtgcggaccgtacaaccgttcaggctgtagcaagcgcaatcggtcgggccattgaggacgaggctcgcttcggtcgtatccgtgaccttgaagctaagcacttcaagaaaaactatgaggaacaactcaacaagcgcgtagggcacgtctacaagaaagcatttatgcaagttgtcgaggctgacatgctctctaagggtctactcggtggcgaggcgtggtcttcgtggcataaggaagactctattcatgtaggagtacgctgcatcgagatgctcattgagtcaaccggaatggttagcttacaccgccaaaatgctggcgtagtaggtcaagactctgagactatcgaactcagtcctgaatacgctgaggctatcgcaacccgtgcaggtgcgctggctggcatctctccgatgttccaaccttgcgtagttcctcctaagccgtggactggcattactggtggtggctattgggctaacggtcgtcgtcctctggcgctggtgcgtactcacagtaagaaaggtctgatgcgctacgaagacgtttacatgcctgaggtgtacaaagcgattaacattgcgcaaaacaccgcctggtcgatcaacaagtgggtcctggcggtcgccaacgtaatcaccaagtggaagcattgtccggtccgggacatccctgcgattgagcgtgaagaactcccgatgaaaccggaagacatcgacatgaatcctgaggctctcaccgcgtggaaacgtgctaaagctgctgtgtaccgcagagacaaggctcgcaagtctcgtcgtatcctgcttgagttcatgcttgagcaagccaataagtttgctaaccataaggccatctggttcccttacaacatggactggcgcggtcgtgtttacgctgtgtcaatgttcaatccgcaaggtaacgatatgaccaaaggactgcttacgctggcgaaaggtaaaccaatcggtaaggaaggttactactggctgaaaatccacggtgcaaactgtgcgggtgtcgataaggttccgttccctgagcgcatcaagttcattgaggaaaaccacgagaacatcatggcttgcgctaagtctccactggagaacacttggtgggctgagcaagatagtccgttctgcttccttgcgttctgctttgagtacgctggggtacagcaccacggcctgagctataactgctcccttccgctggcgtttgacgggtcttgctctggcatccagcacttctccgcgatgctccgagatgaggtaggtggtcgcgcggttaacttgcttcctagtgaaaccgttcaggacatctacgggattgttgctaagaaagtcaacgagattctacaagcagacgcaatcaatgggaccgataacgaagtagttaccgtgaccgatgagaacactggtgaaatctctgagaaagtcaagctgggcactaaggcactggctggtcaatggctggcttacggtgttactcgcagtgtgactaagcgttcagtcatgacgctggcttacgggtccaaagagttcggcttccgtcaacaagtgctgcgccacactattcagtgggctattgattccggcaagggtctgatgttcactcagccgaatcaggctgctggatacatggctaagctgatttgggaatctgtgagcgtgacggtggtagctgcggttgaagcaatgaactggcttaagtctgctgctaagctgctggctgctgaggtcaaagataagaagactggagagattcttcgcaagcgttgcgctgtgcattgggtaactcctgatggtttccctgtgtggcaggaatacaagaagcctattcagacgcgcttgaacctgatgttcctcggtcagttccgcttacagcctaccattaacaccaacaaagatagcgagattgatgcacataaacaggagtctggtatcgctcctaactttgtacacagccaagacggtagccaccttcgtaagactgtagtgtgggcacacgagaagtacggaatcgaatcttttgcactgattcacgactccttcggtaccattccggctgacgctgcgaacctgttcaaagcagtgcgcgaaactatggttgacacatatgagtcttgtgatgtactggctgatttctacgaccagttcgctgaccagttgcacgagtctcaattggacaaaatgccagcacttccggctaaaggtaacttgaacctccgtgacatcttagagtcggacttcgcgttcgcg

SEQ ID NO: 546 - protein, 890 aa, synthetic construct
  REGION 1..890: note = Variant of RNA polymerase
MHHHHHHMNTINIAKNDFSDIELAAIPFNTLADHYGEGLAREQLALEHESYEMGEARFRKMFERQLKAGEVADNAAAKPLITTLLPKMIARINDWFEEVKAKRGKRPTAFQFLQEIKPEAVAYITIKTTLACLTSADRTTVQAVASAIGRAIEDEARFGRIRDLEAKHFKKNYEEQLNKRVGHVYKKAFMQVVEADMLSKGLLGGEAWSSWHKEDSIHVGVRCIEMLIESTGMVSLHRQNAGVVGQDSETIELSPEYAEAIATRAGALAGISPMFQPCVVPPKPWTGITGGGYWANGRRPLALVRTHSKKGLMRYEDVYMPEVYKAINIAQNTAWSINKWVLAVANVITKWKHCPVRDIPAIEREELPMKPEDIDMNPEALTAWKRAKAAVYRRDKARKSRRILLEFMLEQANKFANHKAIWFPYNMDWRGRVYAVSMFNPQGNDMTKGLLTLAKGKPIGKEGYYWLKIHGANCAGVDKVPFPERIKFIEENHENIMACAKSPLENTWWAEQDSPFCFLAFCFEYAGVQHHGLSYNCSLPLAFDGSCSGIQHFSAMLRDEVGGRAVNLLPSETVQDIYGIVAKKVNEILQADAINGTDNEVVTVTDENTGEISEKVKLGTKALAGQWLAYGVTRSVTKRSVMTLAYGSKEFGFRQQVLRHTIQWAIDSGKGLMFTQPNQAAGYMAKLIWESVSVTVVAAVEAMNWLKSAAKLLAAEVKDKKTGEILRKRCAVHWVTPDGFPVWQEYKKPIQTRLNLMFLGQFRLQPTINTNKDSEIDAHKQESGIAPNFVHSQDGSHLRKTVVWAHEKYGIESFALIHDSFGTIPADAANLFKAVRETMVDTYESCDVLADFYDQFADQLHESQLDKMPALPAKGNLNLRDILESDFAFA

SEQ ID NO: 547 - DNA, 2670 bp, synthetic construct
  misc_feature 1..2670: note = Variant of RNA polymerase
  source 1..2670: mol_type = other DNA
atgcaccatcaccatcaccatatgaacacgattaacatcgctaagaacgacttctctgacatcgaactggctgctatcccgttcaacactctggctgaccattacggtgagggcttagctcgcgaacagttggcccttgagcatgagtcttacgagatgggtgaagcacgtttccgcaagtggtttgagcgtcaacttaaagctggtgaggttgcggataacgctgccgccaagcctctcatcactaccctactccctaagatgattgcacgcatcaacgactggtttgaggaagtgaaagctaagcgcggcaagcgcccgacagccttccagttcctgcaagaaatcaagccggaagccgtagcgtacatcaccattaagaccactctggcttgcctaaccagtgcggaccgtacaaccgttcaggctgtagcaagcgcaatcggtcgggccattgaggacgaggctcgcttcggtcgtatccgtgaccttgaagctaagcacttcaagaaaaactatgaggaacaactcaacaagcgcgtagggcacgtctacaagaaagcatttatgcaagttgtcgaggctgacatgctctctaagggtctactcggtggcgaggcgtggtcttcgtggcataaggaagactctattcatgtaggagtacgctgcatcgagatgctcattgagtcaaccggaatggttagcttacaccgccaaaatgctggcgtagtaggtcaagactctgagactatcgaactcgcacctgaatacgctgaggctatcgcaacccgtgcaggtgcgctggctggcatctctccgatgttccaaccttgcgtagttcctcctaagccgtggactggcattactggtggtggctattgggctaacggtcgtcgtcctctggcgctggtgcgtactcacagtaagaaaggtctgatgcgctacgaagacgtttacatgcctgaggtgtacaaagcgattaacattgcgcaaaacaccgcctggtcgatcaacaagtgggtcctggcggtcgccaacgtaatcaccaagtggaagcattgtccggtccgggacatccctgcgattgagcgtgaagaactcccgatgaaaccggaagacatcgacatgaatcctgaggctctcaccgcgtggaaacgtgctaaagctgctgtgtaccgcagagacaaggctcgcaagtctcgtcgtatcctgcttgagttcatgcttgagcaagccaataagtttgctaaccataaggccatctggttcccttacaacatggactggcgcggtcgtgtttacgctgtgtcaatgttcaacccgcaaggtaacgatatgaccaaaggactgcttacgctggcgaaaggtaaaccaatcggtaaggaaggttactactggctgaaaatccacggtgcaaactgtgcgggtgtcgataaggttccgttccctgagcgcatcaagttcattgaggaaaaccacgagaacatcatggcttgcgctaagtctccactggagaacacttggtgggctgagcaagatagtccgttctgcttccttgcgttctgctttgagtacgctggggtacagcaccacggcctgagctataactgctcccttccgctggcgtttgacgggtcttgctctggcatccagcacttctccgcgatgctccgagatgaggtaggtggtcgcgcggttaacttgcttcctagtgaaaccgttcaggacatctacgggattgttgctaagaaagtcaacgagattctacaagcagacgcaatcaatgggaccgataacgaagtagttaccgtgaccgatgagaacactggtgaaatctctgagaaagtcaagctgggcactaaggcactggctggtcaatggctggcttacggtgttactcgcagtgtgactaagcgttcagtcatgacgctggcttacgggtccaaagagttcggcttccgtcaacaagtgctgcgccacactattcagtgggctattgattccggcaagggtctgatgttcactcagccgaatcaggctgctggatacatggctaagctgatttgggaatctgtgagcgtgacggtggtagctgcggttgaagcaatgaactggcttaagtctgctgctaagctgctggctgctgaggtcaaagataagaagactggagagattcttcgcaagcgttgcgctgtgcattgggtaactcctgatggtttccctgtgtggcaggaatacaagaagcctattcagacgcgcttgaacctgatgttcctcggtcagttccgcttacagcctaccattaacaccaacaaagatagcgagattgatgcacataaacaggagtctggtatcgctcctaactttgtacacagccaagacggtagccaccttcgtaagactgtagtgtgggcacacgagaagtacggaatcgaatcttttgcactgattcacgactccttcggtaccattccggctgacgctgcgaacctgttcaaagcagtgcgcgaaactatggttgacacatatgagtcttgtgatgtactggctgatttctacgaccagttcgctgaccagttgcacgagtctcaattggacaaaatgccagcacttccggctaaaggtaacttgaacctccgtgacatcttagagtcggacttcgcgttcgcg

SEQ ID NO: 548 - protein, 890 aa, synthetic construct
  REGION 1..890: note = Variant of RNA polymerase
MHHHHHHMNTINIAKNDFSDIELAAIPFNTLADHYGEGLAREQLALEHESYEMGEARFRKWFERQLKAGEVADNAAAKPLITTLLPKMIARINDWFEEVKAKRGKRPTAFQFLQEIKPEAVAYITIKTTLACLTSADRTTVQAVASAIGRAIEDEARFGRIRDLEAKHFKKNYEEQLNKRVGHVYKKAFMQVVEADMLSKGLLGGEAWSSWHKEDSIHVGVRCIEMLIESTGMVSLHRQNAGVVGQDSETIELAPEYAEAIATRAGALAGISPMFQPCVVPPKPWTGITGGGYWANGRRPLALVRTHSKKGLMRYEDVYMPEVYKAINIAQNTAWSINKWVLAVANVITKWKHCPVRDIPAIEREELPMKPEDIDMNPEALTAWKRAKAAVYRRDKARKSRRILLEFMLEQANKFANHKAIWFPYNMDWRGRVYAVSMFNPQGNDMTKGLLTLAKGKPIGKEGYYWLKIHGANCAGVDKVPFPERIKFIEENHENIMACAKSPLENTWWAEQDSPFCFLAFCFEYAGVQHHGLSYNCSLPLAFDGSCSGIQHFSAMLRDEVGGRAVNLLPSETVQDIYGIVAKKVNEILQADAINGTDNEVVTVTDENTGEISEKVKLGTKALAGQWLAYGVTRSVTKRSVMTLAYGSKEFGFRQQVLRHTIQWAIDSGKGLMFTQPNQAAGYMAKLIWESVSVTVVAAVEAMNWLKSAAKLLAAEVKDKKTGEILRKRCAVHWVTPDGFPVWQEYKKPIQTRLNLMFLGQFRLQPTINTNKDSEIDAHKQESGIAPNFVHSQDGSHLRKTVVWAHEKYGIESFALIHDSFGTIPADAANLFKAVRETMVDTYESCDVLADFYDQFADQLHESQLDKMPALPAKGNLNLRDILESDFAFA

SEQ ID NO: 549 - DNA, 2670 bp, synthetic construct
  misc_feature 1..2670: note = Variant of RNA polymerase
  source 1..2670: mol_type = other DNA
atgcaccatcaccatcaccatatgaacacgattaacatcgctaagaacgacttctctgacatcgaactggctgctatcccgttcaacactctggctgaccattacggtgagggcttagctcgcgaacagttggcccttgagcatgagtcttacgagatgggtgaagcacgtttccgcaagatgtttgagcgtcaacttaaagctggtgaggttgcggataacgctgccgccaagcctctcatcactaccctactccctaagatgattgcacgcatcaacgactggtttgaggaagtgaaagctaagcgcggcaagcgcccgacagccttccagttcctgcaagaaatcaagccggaagccgtagcgtacatcaccattaagaccactctggcttgcctaaccagtgcggaccgtacaaccgttcaggctgtagcaagcgcaatcggtcgggccattgaggacgaggctcgcttcggtcgtatccgtgaccttgaagctaagcacttcaagaaaaactatgaggaacaactcaacaagcgcgtagggcacgtctacaagaaagcatttatgcaagttgtcgaggctgacatgctctctaagggtctactcggtggcgaggcgtggtcttcgtggcataaggaagactctattcatgtaggagtacgctgcatcgagatgctcattgagtcaaccggaatggttagcttacaccgccaaaatgctggcgtagtaggtcaagactctgagactatcgaactcgcacctgaatacgctgaggctatcgcaacccgtgcaggtgcgctggctggcatctctccgatgttccaaccttgcgtagttcctcctaagccgtggactggcattactggtggtggctattgggctaacggtcgtcgtcctctggcgctggtgcgtactcacagtaagaaaggtctgatgcgctacgaagacgtttacatgcctgaggtgtacaaagcgattaacattgcgcaaaacaccgcctggtcgatcaacaagtgggtcctggcggtcgccaacgtaatcaccaagtggaagcattgtccggtccgggacatccctgcgattgagcgtgaagaactcccgatgaaaccggaagacatcgacatgaatcctgaggctctcaccgcgtggaaacgtgctaaagctgctgtgtaccgcagagacaaggctcgcaagtctcgtcgtatcctgcttgagttcatgcttgagcaagccaataagtttgctaaccataaggccatctggttcccttacaacatggactggcgcggtcgtgtttacgctgtgtcaatgttcaacccgcaaggtaacgatatgaccaaaggactgcttacgctggcgaaaggtaaaccaatcggtaaggaaggttactactggctgaaaatccacggtgcaaactgtgcgggtgtcgataaggttccgttccctgagcgcatcaagttcattgaggaaaaccacgagaacatcatggcttgcgctaagtctccactggagaacacttggtgggctgagcaagatagtccgttctgcttccttgcgttctgctttgagtacgctggggtacagcaccacggcctgagctataactgctcccttccgctggcgtttgacgggtcttgctctggcatccagcacttctccgcgatgctccgagatgaggtaggtggtcgcgcggttaacttgcttcctagtgaaaccgttcaggacatctacgggattgttgctaagaaagtcaacgagattctacaagcagacgcaatcaatgggaccgataacgaagtagttaccgtgaccgatgagaacactggtgaaatctctgagaaagtcaagctgggcactaaggcactggcttgtcaatggctggcttacggtgttactcgcagtgtgactaagcgttcagtcatgacgctggcttacgggtccaaagagttcggcttccgtcaacaagtgctgcgccacactattcagtgggctattgattccggcaagggtctgatgttcactcagccgaatcaggctgctggatacatggctaagctgatttgggaatctgtgagcgtgacggtggtagctgcggttgaagcaatgaactggcttaagtctgctgctaagctgctggctgctgaggtcaaagataagaagactggagagattcttcgcaagcgttgcgctgtgcattgggtaactcctgatggtttccctgtgtggcaggaatacaagaagcctattcagacgcgcttgaacctgatgttcctcggtcagttccgcttacagcctaccattaacaccaacaaagatagcgagattgatgcacataaacaggagtctggtatcgctcctaactttgtacacagccaagacggtagccaccttcgtaagactgtagtgtgggcacacgagaagtacggaatcgaatcttttgcactgattcacgactccttcggtaccattccggctgacgctgcgaacctgttcaaagcagtgcgcgaaactatggttgacacatatgagtcttgtgatgtactggctgatttctacgaccagttcgctgaccagttgcacgagtctcaattggacaaaatgccagcacttccggctaaaggtaacttgaacctccgtgacatcttagagtcggacttcgcgttcgcg

SEQ ID NO: 550 - protein, 890 aa, synthetic construct
  REGION 1..890: note = Variant of RNA polymerase
MHHHHHHMNTINIAKNDFSDIELAAIPFNTLADHYGEGLAREQLALEHESYEMGEARFRKMFERQLKAGEVADNAAAKPLITTLLPKMIARINDWFEEVKAKRGKRPTAFQFLQEIKPEAVAYITIKTTLACLTSADRTTVQAVASAIGRAIEDEARFGRIRDLEAKHFKKNYEEQLNKRVGHVYKKAFMQVVEADMLSKGLLGGEAWSSWHKEDSIHVGVRCIEMLIESTGMVSLHRQNAGVVGQDSETIELAPEYAEAIATRAGALAGISPMFQPCVVPPKPWTGITGGGYWANGRRPLALVRTHSKKGLMRYEDVYMPEVYKAINIAQNTAWSINKWVLAVANVITKWKHCPVRDIPAIEREELPMKPEDIDMNPEALTAWKRAKAAVYRRDKARKSRRILLEFMLEQANKFANHKAIWFPYNMDWRGRVYAVSMFNPQGNDMTKGLLTLAKGKPIGKEGYYWLKIHGANCAGVDKVPFPERIKFIEENHENIMACAKSPLENTWWAEQDSPFCFLAFCFEYAGVQHHGLSYNCSLPLAFDGSCSGIQHFSAMLRDEVGGRAVNLLPSETVQDIYGIVAKKVNEILQADAINGTDNEVVTVTDENTGEISEKVKLGTKALACQWLAYGVTRSVTKRSVMTLAYGSKEFGFRQQVLRHTIQWAIDSGKGLMFTQPNQAAGYMAKLIWESVSVTVVAAVEAMNWLKSAAKLLAAEVKDKKTGEILRKRCAVHWVTPDGFPVWQEYKKPIQTRLNLMFLGQFRLQPTINTNKDSEIDAHKQESGIAPNFVHSQDGSHLRKTVVWAHEKYGIESFALIHDSFGTIPADAANLFKAVRETMVDTYESCDVLADFYDQFADQLHESQLDKMPALPAKGNLNLRDILESDFAFA

SEQ ID NO: 551 - DNA, 2670 bp, synthetic construct
  misc_feature 1..2670: note = Variant of RNA polymerase
  source 1..2670: mol_type = other DNA
atgcaccatcaccatcaccatatgaacacgattaacatccagaagaacgacttctctgacatcgaactggctgctatcccgttcaacactctggctgaccattacggtgagggcttagctcgcgaacagttggcccttgagcatgagtcttacgagatgggtgaagcacgtttccgcaagatgtttgagcgtcaacttagagctggtgaggttgcggataacgctgccgccaagcctctcatcactaccctactccctaagatgattgcacgcatcaacgactggtttgaggaagtgaaagctaagcgcggcaagcgcccgacagccttccagttcctgcaagaaatcaagccggaagccgtagcgtacatcaccattaagaccactctggcttgcctaaccagtgcggaccgtacaaccgttcaggctgtagcaagcgcaatcggtcgggccattgaggacgaggctcgcttcggtcgtatccgtgaccttgaagctaagcacttcaagaaaaactatgaggaacaactcaacaagcgcgtagggcacgtctacaagaaagcatttatgcaagttgtcgaggctgacatgctctctaagggtctactcggtggcgaggcgtggtcttcgtggcataaggaagactctattcatgtaggagtacgctgcatcgagatgctcattgagtcaaccggaatggttagcttacaccgccaaaatgctggcgtagtaggtcaagactctgagactatcgaactcgcacctgaatacgctgaggctatcgcaacccgtgcaggtgcgctggctggcatctctccgatgttccaaccttgcgtagttcctcctaagccgtggactggcattactggtggtggctattgggctaacggtcgtcgtcctctggcgctggtgcgtactcacagtaagaaaggtctgatgcgctacgaagacgtttacatgcctgaggtgtacaaagcgattaacattgcgcaaaacaccgcctggtcgatcaacaagtgggtcctggcggtcgccaacgtaatcaccaagtggaagcattgtccggtccgggacatccctgcgattgagcgtgaagaactcccgatgaaaccggaagacatcgacatgaatcctgaggctctcaccgcgtggaaacgtgctaaagctgctgtgtaccgcagagacaaggctcgcaagtctcgtcgtatcctgcttgagttcatgcttgagcaagccaataagtttgctaaccataaggccatctggttcccttacaacatggactggcgcggtcgtgtttacgctgtgtcaatgttcaacccgcaaggtaacgatatgaccaaaggactgcttacgctggcgaaaggtaaaccaatcggtaaggaaggttactactggctgaaaatccacggtgcaaactgtgcgggtgtcgataaggttccgttccctgagcgcatcaagttcattgaggaaaaccacgagaacatcatggcttgcgctaagtctccactggagaacacttggtgggctgagcaagatagtccgttctgcttccttgcgttctgctttgagtacgctggggtacagcaccacggcctgagctataactgctcccttccgctggcgtttgacgggtcttgctctggcatccagcacttctccgcgatgctccgagatgaggtaggtggtcgcgcggttaacttgcttcctagtgaaaccgttcaggacatctacgggattgttgctaagaaagtcaacgagattctacaagcagacgcaatcaatgggaccgataacgaagtagttaccgtgaccgatgagaacactggtgaaatctctgagaaagtcaagctgggcactaaggcactggctggtcaatggctggcttacggtgttactcgcagtgtgactaagcgttcagtcatgacgctggcttacgggtccaaagagttcggcttccgtcaacaagtgctgcgccacactattcagtgggctattgattccggcaagggtctgatgttcactcagccgaatcaggctgctggatacatggctaagctgatttgggaatctgtgagcgtgacggtggtagctgcggttgaagcaatgaactggcttaagtctgctgctaagctgctggctgctgaggtcaaagataagaagactggagagattcttcgcaagcgttgcgctgtgcattgggtaactcctgatggtttccctgtgtggcaggaatacaagaagcctattcagacgcgcttgaacctgatgttcctcggtcagttccgcttacagcctaccattaacaccaacaaagatagcgagattgatgcacataaacaggagtctggtatcgctcctaactttgtacacagccaagacggtagccaccttcgtaagactgtagtgtgggcacacgagaagtacggaatcgaatcttttgcactgattcacgactccttcggtaccattccggctgacgctgcgaacctgttcaaagcagtgcgcgaaactatggttgacacatatgagtcttgtgatgtactggctgatttctacgaccagttcgctgaccagttgcacgagtctcaattggacaaaatgccagcacttccggctaaaggtaacttgaacctccgtgacatcttagagtcggacttcgcgttcgcg

SEQ ID NO: 552 - protein, 890 aa, synthetic construct
  REGION 1..890: note = Variant of RNA polymerase
MHHHHHHMNTINIQKNDFSDIELAAIPFNTLADHYGEGLAREQLALEHESYEMGEARFRKMFERQLRAGEVADNAAAKPLITTLLPKMIARINDWFEEVKAKRGKRPTAFQFLQEIKPEAVAYITIKTTLACLTSADRTTVQAVASAIGRAIEDEARFGRIRDLEAKHFKKNYEEQLNKRVGHVYKKAFMQVVEADMLSKGLLGGEAWSSWHKEDSIHVGVRCIEMLIESTGMVSLHRQNAGVVGQDSETIELAPEYAEAIATRAGALAGISPMFQPCVVPPKPWTGITGGGYWANGRRPLALVRTHSKKGLMRYEDVYMPEVYKAINIAQNTAWSINKWVLAVANVITKWKHCPVRDIPAIEREELPMKPEDIDMNPEALTAWKRAKAAVYRRDKARKSRRILLEFMLEQANKFANHKAIWFPYNMDWRGRVYAVSMFNPQGNDMTKGLLTLAKGKPIGKEGYYWLKIHGANCAGVDKVPFPERIKFIEENHENIMACAKSPLENTWWAEQDSPFCFLAFCFEYAGVQHHGLSYNCSLPLAFDGSCSGIQHFSAMLRDEVGGRAVNLLPSETVQDIYGIVAKKVNEILQADAINGTDNEVVTVTDENTGEISEKVKLGTKALAGQWLAYGVTRSVTKRSVMTLAYGSKEFGFRQQVLRHTIQWAIDSGKGLMFTQPNQAAGYMAKLIWESVSVTVVAAVEAMNWLKSAAKLLAAEVKDKKTGEILRKRCAVHWVTPDGFPVWQEYKKPIQTRLNLMFLGQFRLQPTINTNKDSEIDAHKQESGIAPNFVHSQDGSHLRKTVVWAHEKYGIESFALIHDSFGTIPADAANLFKAVRETMVDTYESCDVLADFYDQFADQLHESQLDKMPALPAKGNLNLRDILESDFAFA

SEQ ID NO: 553 - DNA, 2670 bp, synthetic construct
  misc_feature 1..2670: note = Variant of RNA polymerase
  source 1..2670: mol_type = other DNA
atgcaccatcaccatcaccatatgaacacgattaacatcgctaagaacgacttctctgacggtgaactggctgctatcccgttcaacactctggctgaccattacggtgagggcttagctcgcgaacagttggcccttgagcatgagtcttacgagatgggtgaagcacgtttccgcaagatgtttgagcgtcaacttaaagctggtgaggttgcggataacgctgccgccaagcctctcatcactaccctactccctaagatgattgcacgcatcaacgactggtttgaggaagtgaaagctaagcgcggcaagcgcccgacagccttccagttcctgcaagaaatcaagccggaagccgtagcgtacatcaccattaagaccactctggcttgcctaaccagtgcggaccgtacaaccgttcaggctgtagcaagcgcaatcggtcgggccattgaggacgaggctcgcttcggtcgtatccgtgaccttgaagctaagcacttcaagaaaaactatgaggaacaactcaacaagcgcgtagggcacgtctacaagaaagcatttatgcaagttgtcgaggctgacatgctctctaagggtctactcggtggcgaggcgtggtcttcgtggcataaggaagactctattcatgtaggagtacgctgcatcgagatgctcattgagtcaaccggaatggttagcttacaccgccaaaatgctggcgtagtaggtcaagactctgagactatcgaactcgcacctgaatacgctgaggctatcgcaacccgtgcaggtgcgctggctggcatctctccgatgttccaaccttgcgtagttcctcctaagccgtggactggcattactggtggtggctattgggctaacggtcgtcgtcctctggcgctggtgcgtactcacagtaagaaaggtctgatgcgctacgaagacgtttacatgcctgaggtgtacaaagcgattaacattgcgcaaaacaccgcctggtcgatcaacaagtgggtcctggcggtcgccaacgtaatcaccaagtggaagcattgtccggtccgggacatccctgcgattgagcgtgaagaactcccgatgaaaccggaagacatcgacatgaatcctgaggctctcaccgcgtggaaacgtgctaaagctgctgtgtaccgcagagacaaggctcgcaagtctcgtcgtatcctgcttgagttcatgcttgagcaagccaataagtttgctaaccataaggccatctggttcccttacaacatggactggcgcggtcgtgtttacgctgtgtcaatgttcaacccgcaaggtaacgatatgaccaaaggactgcttacgctggcgaaaggtaaaccaatcggtaaggaaggttactactggctgaaaatccacggtgcaaactgtgcgggtgtcgataaggttccgttccctgagcgcatcaagttcattgaggaaaaccacgagaacatcatggcttgcgctaagtctccactggagaacacttggtgggctgagcaagatagtccgttctgcttccttgcgttctgctttgagtacgctggggtacagcaccacggcctgagctataactgctcccttccgctggcgtttgacgggtcttgctctggcatccagcacttctccgcgatgctccgagatgaggtaggtggtcgcgcggttaacttgcttcctagtgaaaccgttcaggacatctacgggattgttgctaagaaagtcaacgagattctacaagcagacgcaatcaatgggaccgataacgaagtagttaccgtgaccgatgagaacactggtgaaatctctgagaaagtcaagctgggcactaaggcactggctggtcaatggctggcttacggtgttactcgcagtgtgactaagcgttcagtcatgacgctggcttacgggtccaaagagttcggcttccgtcaacaagtgctgcgccacactattcagtgggctattgattccggcaagggtctgatgttcactcagccgaatcaggctgctggatacatggctaagctgatttgggaatctgtgagcgtgacggtggtagctgcggttgaagcaatgaactggcttaagtctgctgctaagctgctggctgctgaggtcaaagataagaagactggagagattcttcgcaagcgttgcgctgtgcattgggtaactcctgatggtttccctgtgtggcaggaatacaagaagcctattcagacgcgcttgaacctgatgttcctcggtcagttccgcttacagcctaccattaacaccaacaaagatagcgagattgatgcacataaacaggagtctggtatcgctcctaactttgtacacagccaagacggtagccaccttcgtaagactgtagtgtgggcacacgagaagtacggaatcgaatcttttgcactgattcacgactccttcggtaccattccggctgacgctgcgaacctgttcaaagcagtgcgcgaaactatggttgacacatatgagtcttgtgatgtactggctgatttctacgaccagttcgctgaccagttgcacgagtctcaattggacaaaatgccagcacttccggctaaaggtaacttgaacctccgtgacatcttagagtcggacttcgcgttcgcg

SEQ ID NO: 554 - protein, 890 aa, synthetic construct
  REGION 1..890: note = Variant of RNA polymerase
MHHHHHHMNTINIAKNDFSDGELAAIPFNTLADHYGEGLAREQLALEHESYEMGEARFRKMFERQLKAGEVADNAAAKPLITTLLPKMIARINDWFEEVKAKRGKRPTAFQFLQEIKPEAVAYITIKTTLACLTSADRTTVQAVASAIGRAIEDEARFGRIRDLEAKHFKKNYEEQLNKRVGHVYKKAFMQVVEADMLSKGLLGGEAWSSWHKEDSIHVGVRCIEMLIESTGMVSLHRQNAGVVGQDSETIELAPEYAEAIATRAGALAGISPMFQPCVVPPKPWTGITGGGYWANGRRPLALVRTHSKKGLMRYEDVYMPEVYKAINIAQNTAWSINKWVLAVANVITKWKHCPVRDIPAIEREELPMKPEDIDMNPEALTAWKRAKAAVYRRDKARKSRRILLEFMLEQANKFANHKAIWFPYNMDWRGRVYAVSMFNPQGNDMTKGLLTLAKGKPIGKEGYYWLKIHGANCAGVDKVPFPERIKFIEENHENIMACAKSPLENTWWAEQDSPFCFLAFCFEYAGVQHHGLSYNCSLPLAFDGSCSGIQHFSAMLRDEVGGRAVNLLPSETVQDIYGIVAKKVNEILQADAINGTDNEVVTVTDENTGEISEKVKLGTKALAGQWLAYGVTRSVTKRSVMTLAYGSKEFGFRQQVLRHTIQWAIDSGKGLMFTQPNQAAGYMAKLIWESVSVTVVAAVEAMNWLKSAAKLLAAEVKDKKTGEILRKRCAVHWVTPDGFPVWQEYKKPIQTRLNLMFLGQFRLQPTINTNKDSEIDAHKQESGIAPNFVHSQDGSHLRKTVVWAHEKYGIESFALIHDSFGTIPADAANLFKAVRETMVDTYESCDVLADFYDQFADQLHESQLDKMPALPAKGNLNLRDILESDFAFA

SEQ ID NO: 555 - DNA, 2670 bp, synthetic construct
  misc_feature 1..2670: note = Variant of RNA polymerase
  source 1..2670: mol_type = other DNA
atgcaccatcaccatcaccatatgaacacgattaacatcgctaagaacgacttctctgacatcgaactggctgctatcccgttcaacactctggctgaccattacggtgagggcttagctcgcgaacagttggcccttgagcatgagtcttacgagatgggtgaagcacgtttccgcaagatgtttgagcgtcaacttaaagctggtgaggttgcggataacgctgccgccaagcctctcatcactaccctactccctaagatgattgcacgcatcaacgactggtttgaggaagtgaaagctaagcgcggcaagcgcccgacagccttccagttcctgcaagaaatcaagccggaagccgtagcgtacatcaccattaagaccactctggcttgcctaaccagtgcggaccgtacaaccgttcaggctgtagcaagcgcaatcggtcgggccattgaggacgaggctcgcttcggtcgtatccgtgaccttgaagctaagcacttcaagaaaaactatgaggaacaactcaacaagcgcgtagggcacgtctacaagaaagcatttatgcaagttgtcgaggctgacatgctctctaagggtctactcggtggcgaggcgtggtcttcgtggcataaggaagactctattcatgtaggagtacgctgcatcgagatgctcattgagtcaaccggaatggttagcttacaccgccaaaatgctggcgtagtaggtcaagactctgagactatcgaactcggtcctgaatacgctgaggctatcgcaacccgtgcaggtgcgctggctggcatctctccgatgttccaaccttgcgtagttcctcctaagccgtggactggcattactggtggtggctattgggctaacggtcgtcgtcctctggcgctggtgcgtactcacagtaagaaaggtctgatgcgctacgaagacgtttacatgcctgaggtgtacaaagcgattaacattgcgcaaaacaccgcctggtcgatcaacaagtgggtcctggcggtcgccaacgtaatcaccaagtggaagcattgtccggtccgggacatccctgcgattgagcgtgaagaactcccgatgaaaccggaagacatcgacatgaatcctgaggctctcaccgcgtggaaacgtgctaaagctgctgtgtaccgcagagacaaggctcgcaagtctcgtcgtatcctgcttgagttcatgcttgagcaagccaataagtttgctaaccataaggccatctggttcccttacaacatggactggcgcggtcgtgtttacgctgtgtcaatgttcaacccgcaaggtaacgatatgaccaaaggactgcttacgctggcgaaaggtaaaccaatcggtaaggaaggttactactggctgaaaatccacggtgcaaactgtgcgggtgtcgataaggttccgttccctgagcgcatcaagttcattgaggaaaaccacgagaacatcatggcttgcgctaagtctccactggagaacacttggtgggctgagcaagatagtccgttctgcttccttgcgttctgctttgagtacgctggggtacagcaccacggcctgagctataactgctcccttccgctggcgtttgacgggtcttgctctggcatccagcacttctccgcgatgctccgagatgaggtaggtggtcgcgcggttaacttgcttcctagtgaaaccgttcaggacatctacgggattgttgctaagaaagtcaacgagattctacaagcagacgcaatcaatgggaccgataacgaagtagttaccgtgaccgatgagaacactggtgaaatctctgagaaagtcaagctgggcactaaggcactggctggtcaatggctggcttacggtgttactcgcagtgtgactaagcgttcagtcatgacgctggcttacgggtccaaagagttcggcttccgtcaacaagtgctgcgccacactattcagtgggctattgattccggcaagggtctgatgttcactcagccgaatcaggctgctggatacatggctaagctgatttgggaatctgtgagcgtgacggtggtagctgcggttgaagcaatgaactggcttaagtctgctgctaagctgctggctgctgaggtcaaagataagaagactggagagattcttcgcaagcgttgcgctgtgcattgggtaactcctgatggtttccctgtgtggcaggaatacaagaagcctattcagacgcgcttgaacctgatgttcctcggtcagttccgcttacagcctaccattaacaccaacaaagatagcgagattgatgcacataaacaggagtctggtatcgctcctaactttgtacacagccaagacggtagccaccttcgtaagactgtagtgtgggcacacgagaagtacggaatcgaatcttttgcactgattcacgactccttcggtaccattccggctgacgctgcgaacctgttcaaagcagtgcgcgaaactatggttgacacatatgagtcttgtgatgtactggctgatttctacgaccagttcgctgaccagttgcacgagtctcaattggacaaaatgccagcacttccggctaaaggtaacttgaacctccgtgacatcttagagtcggacttcgcgttcgcg

SEQ ID NO: 556 - protein, 890 aa, synthetic construct
  REGION 1..890: note = Variant of RNA polymerase
MHHHHHHMNTINIAKNDFSDIELAAIPFNTLADHYGEGLAREQLALEHESYEMGEARFRKMFERQLKAGEVADNAAAKPLITTLLPKMIARINDWFEEVKAKRGKRPTAFQFLQEIKPEAVAYITIKTTLACLTSADRTTVQAVASAIGRAIEDEARFGRIRDLEAKHFKKNYEEQLNKRVGHVYKKAFMQVVEADMLSKGLLGGEAWSSWHKEDSIHVGVRCIEMLIESTGMVSLHRQNAGVVGQDSETIELGPEYAEAIATRAGALAGISPMFQPCVVPPKPWTGITGGGYWANGRRPLALVRTHSKKGLMRYEDVYMPEVYKAINIAQNTAWSINKWVLAVANVITKWKHCPVRDIPAIEREELPMKPEDIDMNPEALTAWKRAKAAVYRRDKARKSRRILLEFMLEQANKFANHKAIWFPYNMDWRGRVYAVSMFNPQGNDMTKGLLTLAKGKPIGKEGYYWLKIHGANCAGVDKVPFPERIKFIEENHENIMACAKSPLENTWWAEQDSPFCFLAFCFEYAGVQHHGLSYNCSLPLAFDGSCSGIQHFSAMLRDEVGGRAVNLLPSETVQDIYGIVAKKVNEILQADAINGTDNEVVTVTDENTGEISEKVKLGTKALAGQWLAYGVTRSVTKRSVMTLAYGSKEFGFRQQVLRHTIQWAIDSGKGLMFTQPNQAAGYMAKLIWESVSVTVVAAVEAMNWLKSAAKLLAAEVKDKKTGEILRKRCAVHWVTPDGFPVWQEYKKPIQTRLNLMFLGQFRLQPTINTNKDSEIDAHKQESGIAPNFVHSQDGSHLRKTVVWAHEKYGIESFALIHDSFGTIPADAANLFKAVRETMVDTYESCDVLADFYDQFADQLHESQLDKMPALPAKGNLNLRDILESDFAFA

SEQ ID NO: 557 - DNA, 2670 bp, synthetic construct
  misc_feature 1..2670: note = Variant of RNA polymerase
  source 1..2670: mol_type = other DNA
atgcaccatcaccatcaccatatgaacacgattaacatcgctaagaacgacttctctgacatcgaactggctgctatcccgttcaacactctggctgaccattacggtgagggcttagctcgcgaacagttggcccttgagcatgagtcttacgagatgggtgaagcacgtttccgcaagatgtttgagcgtcaacttaaagctggtgaggttgcggataacgctgccgccaagcctctcatcactaccctactccctaagatgattgcacgcatctatgactggtttgaggaagtgaaagctaagcgcggcaagcgcccgacagccttccagttcctgcaagaaatcaagccggaagccgtagcgtacatcaccattaagaccactctggcttgcctaaccagtgcggaccgtacaaccgttcaggctgtagcaagcgcaatcggtcgggccattgaggacgaggctcgcttcggtcgtatccgtgaccttgaagctaagcacttcaagaaaaactatgaggaacaactcaacaagcgcgtagggcacgtctacaagaaagcatttatgcaagttgtcgaggctgacatgctctctaagggtctactcggtggcgaggcgtggtcttcgtggcataaggaagactctattcatgtaggagtacgctgcatcgagatgctcattgagtcaaccggaatggttagcttacaccgccaaaatgctggcgtagtaggtcaagactctgagactatcgaactcgcacctgaatacgctgaggctatcgcaacccgtgcaggtgcgctggctggcatctctccgatgttccaaccttgcgtagttcctcctaagccgtggactggcattactggtggtggctattgggctaacggtcgtcgtcctctggcgctggtgcgtactcacagtaagaaaggtctgatgcgctacgaagacgtttacatgcctgaggtgtacaaagcgattaacattgcgcaaaacaccgcctggtcgatcaacaagtgggtcctggcggtcgccaacgtaatcaccaagtggaagcattgtccggtccgggacatccctgcgattgagcgtgaagaactcccgatgaaaccggaagacatcgacatgaatcctgaggctctcaccgcgtggaaacgtgctaaagctgctgtgtaccgcagagacaaggctcgcaagtctcgtcgtatcctgcttgagttcatgcttgagcaagccaataagtttgctaaccataaggccatctggttcccttacaacatggactggcgcggtcgtgtttacgctgtgtcaatgttcaacccgcaaggtaacgatatgaccaaaggactgcttacgctggcgaaaggtaaaccaatcggtaaggaaggttactactggctgaaaatccacggtgcaaactgtgcgggtgtcgataaggttccgttccctgagcgcatcaagttcattgaggaaaaccacgagaacatcatggcttgcgctaagtctccactggagaacacttggtgggctgagcaagatagtccgttctgcttccttgcgttctgctttgagtacgctggggtacagcaccacggcctgagctataactgctcccttccgctggcgtttgacgggtcttgctctggcatccagcacttctccgcgatgctccgagatgaggtaggtggtcgcgcggttaacttgcttcctagtgaaaccgttcaggacatctacgggattgttgctaagaaagtcaacgagattctacaagcagacgcaatcaatgggaccgataacgaagtagttaccgtgaccgatgagaacactggtgaaatctctgagaaagtcaagctgggcactaaggcactggctggtcaatggctggcttacggtgttactcgcagtgtgactaagcgttcagtcatgacgctggcttacgggtccaaagagttcggcttccgtcaacaagtgctgcgccacactattcagtgggctattgattccggcaagggtctgatgttcactcagccgaatcaggctgctggatacatggctaagctgatttgggaatctgtgagcgtgacggtggtagctgcggttgaagcaatgaactggcttaagtctgctgctaagctgctggctgctgaggtcaaagataagaagactggagagattcttcgcaagcgttgcgctgtgcattgggtaactcctgatggtttccctgtgtggcaggaatacaagaagcctattcagacgcgcttgaacctgatgttcctcggtcagttccgcttacagcctaccattaacaccaacaaagatagcgagattgatgcacataaacaggagtctggtatcgctcctaactttgtacacagccaagacggtagccaccttcgtaagactgtagtgtgggcacacgagaagtacggaatcgaatcttttgcactgattcacgactccttcggtaccattccggctgacgctgcgaacctgttcaaagcagtgcgcgaaactatggttgacacatatgagtcttgtgatgtactggctgatttctacgaccagttcgctgaccagttgcacgagtctcaattggacaaaatgccagcacttccggctaaaggtaacttgaacctccgtgacatcttagagtcggacttcgcgttcgcg

SEQ ID NO: 558 - protein, 890 aa, synthetic construct
  REGION 1..890: note = Variant of RNA polymerase
MHHHHHHMNTINIAKNDFSDIELAAIPFNTLADHYGEGLAREQLALEHESYEMGEARFRKMFERQLKAGEVADNAAAKPLITTLLPKMIARIYDWFEEVKAKRGKRPTAFQFLQEIKPEAVAYITIKTTLACLTSADRTTVQAVASAIGRAIEDEARFGRIRDLEAKHFKKNYEEQLNKRVGHVYKKAFMQVVEADMLSKGLLGGEAWSSWHKEDSIHVGVRCIEMLIESTGMVSLHRQNAGVVGQDSETIELAPEYAEAIATRAGALAGISPMFQPCVVPPKPWTGITGGGYWANGRRPLALVRTHSKKGLMRYEDVYMPEVYKAINIAQNTAWSINKWVLAVANVITKWKHCPVRDIPAIEREELPMKPEDIDMNPEALTAWKRAKAAVYRRDKARKSRRILLEFMLEQANKFANHKAIWFPYNMDWRGRVYAVSMFNPQGNDMTKGLLTLAKGKPIGKEGYYWLKIHGANCAGVDKVPFPERIKFIEENHENIMACAKSPLENTWWAEQDSPFCFLAFCFEYAGVQHHGLSYNCSLPLAFDGSCSGIQHFSAMLRDEVGGRAVNLLPSETVQDIYGIVAKKVNEILQADAINGTDNEVVTVTDENTGEISEKVKLGTKALAGQWLAYGVTRSVTKRSVMTLAYGSKEFGFRQQVLRHTIQWAIDSGKGLMFTQPNQAAGYMAKLIWESVSVTVVAAVEAMNWLKSAAKLLAAEVKDKKTGEILRKRCAVHWVTPDGFPVWQEYKKPIQTRLNLMFLGQFRLQPTINTNKDSEIDAHKQESGIAPNFVHSQDGSHLRKTVVWAHEKYGIESFALIHDSFGTIPADAANLFKAVRETMVDTYESCDVLADFYDQFADQLHESQLDKMPALPAKGNLNLRDILESDFAFA

SEQ ID NO: 559 - DNA, 2670 bp, synthetic construct
  misc_feature 1..2670: note = Variant of RNA polymerase
  source 1..2670: mol_type = other DNA
atgcaccatcaccatcaccatatgaacacgattaacatcgctaagaacgacttctctgacatcgaactggctgctatcccgttcaacactctggctgaccattacggtgagggcttagctcgcgaacagttggcccttgagcatgagtcttacgagatgggtgaagcacgtttccgcaagatgtttgagcgtcaacttaaagctggtgaggttgcggataacgctgccgccaagcctctcatcactaccctactccctaagatgattgcacgcatcaacgactggtttgaggaagtgaaagctaagcgcggcaagcgcccgacagccttccagttcctgcaagaaatcaagccggaagccgtagcgtacatcaccattaagaccactctggcttgcctaaccagtgcggaccgtacaaccgttcaggctgtagcaagcgcaatcggtcgggccattgaggacgaggctcgcttcggtcgtatccgtgaccttgaagctaagcacttcaagaaaaactatgaggaacaactcaacaagcgcgtagggcacgtctacaagaaagcatttatgcaagttgtcgaggctgacatgctctctaagggtctactcggtggcgaggcgtggtcttcgtggcataaggaagactctattcatgtaggagtacgctgcatcgagatgctcattgagtcaaccggaatggttagcttacaccgccaaaatgctggcgtagtaggtcaagactctgagcggatcgaactcgcacctgaatacgctgaggctatcgcaacccgtgcaggtgcgctggctggcatctctccgatgttccaaccttgcgtagttcctcctaagccgtggactggcattactggtggtggctattgggctaacggtcgtcgtcctctggcgctggtgcgtactcacagtaagaaaggtctgatgcgctacgaagacgtttacatgcctgaggtgtacaaagcgattaacattgcgcaaaacaccgcctggtcgatcaacaagtgggtcctggcggtcgccaacgtaatcaccaagtggaagcattgtccggtccgggacatccctgcgattgagcgtgaagaactcccgatgaaaccggaagacatcgacatgaatcctgaggctctcaccgcgtggaaacgtgctaaagctgctgtgtaccgcagagacaaggctcgcaagtctcgtcgtatcctgcttgagttcatgcttgagcaagccaataagtttgctaaccataaggccatctggttcccttacaacatggactggcgcggtcgtgtttacgctgtgtcaatgttcaacccgcaaggtaacgatatgaccaaaggactgcttacgctggcgaaaggtaaaccaatcggtaaggaaggttactactggctgaaaatccacggtgcaaactgtgcgggtgtcgataaggttccgttccctgagcgcatcaagttcattgaggaaaaccacgagaacatcatggcttgcgctaagtctccactggagaacacttggtgggctgagcaagatagtccgttctgcttccttgcgttctgctttgagtacgctggggtacagcaccacggcctgagctataactgctcccttccgctggcgtttgacgggtcttgctctggcatccagcacttctccgcgatgctccgagatgaggtaggtggtcgcgcggttaacttgcttcctagtgaaaccgttcaggacatctacgggattgttgctaagaaagtcaacgagattctacaagcagacgcaatcaatgggaccgataacgaagtagttaccgtgaccgatgagaacactggtgaaatctctgagaaagtcaagctgggcactaaggcactggctggtcaatggctggcttacggtgttactcgcagtgtgactaagcgttcagtcatgacgctggcttacgggtccaaagagttcggcttccgtcaacaagtgctgcgccacactattcagtgggctattgattccggcaagggtctgatgttcactcagccgaatcaggctgctggatacatggctaagctgatttgggaatctgtgagcgtgacggtggtagctgcggttgaagcaatgaactggcttaagtctgctgctaagctgctggctgctgaggtcaaagataagaagactggagagattcttcgcaagcgttgcgctgtgcattgggtaactcctgatggtttccctgtgtggcaggaatacaagaagcctattcagacgcgcttgaacctgatgttcctcggtcagttccgcttacagcctaccattaacaccaacaaagatagcgagattgatgcacataaacaggagtctggtatcgctcctaactttgtacacagccaagacggtagccaccttcgtaagactgtagtgtgggcacacgagaagtacggaatcgaatcttttgcactgattcacgactccttcggtaccattccggctgacgctgcgaacctgttcaaagcagtgcgcgaaactatggttgacacatatgagtcttgtgatgtactggctgatttctacgaccagttcgctgaccagttgcacgagtctcaattggacaaaatgccagcacttccggctaaaggtaacttgaacctccgtgacatcttagagtcggacttcgcgttcgcg

SEQ ID NO: 560 - protein, 890 aa, synthetic construct
  REGION 1..890: note = Variant of RNA polymerase
MHHHHHHMNTINIAKNDFSDIELAAIPFNTLADHYGEGLAREQLALEHESYEMGEARFRKMFERQLKAGEVADNAAAKPLITTLLPKMIARINDWFEEVKAKRGKRPTAFQFLQEIKPEAVAYITIKTTLACLTSADRTTVQAVASAIGRAIEDEARFGRIRDLEAKHFKKNYEEQLNKRVGHVYKKAFMQVVEADMLSKGLLGGEAWSSWHKEDSIHVGVRCIEMLIESTGMVSLHRQNAGVVGQDSERIELAPEYAEAIATRAGALAGISPMFQPCVVPPKPWTGITGGGYWANGRRPLALVRTHSKKGLMRYEDVYMPEVYKAINIAQNTAWSINKWVLAVANVITKWKHCPVRDIPAIEREELPMKPEDIDMNPEALTAWKRAKAAVYRRDKARKSRRILLEFMLEQANKFANHKAIWFPYNMDWRGRVYAVSMFNPQGNDMTKGLLTLAKGKPIGKEGYYWLKIHGANCAGVDKVPFPERIKFIEENHENIMACAKSPLENTWWAEQDSPFCFLAFCFEYAGVQHHGLSYNCSLPLAFDGSCSGIQHFSAMLRDEVGGRAVNLLPSETVQDIYGIVAKKVNEILQADAINGTDNEVVTVTDENTGEISEKVKLGTKALAGQWLAYGVTRSVTKRSVMTLAYGSKEFGFRQQVLRHTIQWAIDSGKGLMFTQPNQAAGYMAKLIWESVSVTVVAAVEAMNWLKSAAKLLAAEVKDKKTGEILRKRCAVHWVTPDGFPVWQEYKKPIQTRLNLMFLGQFRLQPTINTNKDSEIDAHKQESGIAPNFVHSQDGSHLRKTVVWAHEKYGIESFALIHDSFGTIPADAANLFKAVRETMVDTYESCDVLADFYDQFADQLHESQLDKMPALPAKGNLNLRDILESDFAFA

SEQ ID NO: 561 - DNA, 2670 bp, synthetic construct
  misc_feature 1..2670: note = Variant of RNA polymerase
  source 1..2670: mol_type = other DNA
atgcaccatcaccatcaccatatgaacacgattaacatcgctaagaacgacttctctgacatcgaactggctgctatcccgttcaacactctggctgaccattacggtgagggcttagctcgcgaacagttggcccttgagcatgagtcttacgagatgggtgaagcacgtttccgcaagatgtttgagcgtcaacttaaagctggtgaggttgcggataacgctgccgccaagcctctcatcactaccctactccctaagatgattgcacgcatcaacgactggtttgaggaagtgaaagctaagcgcggcaagcgcccgacagccttccagttcctgcaagaaatcaagccggaagccgtagcgtacatcaccattaagaccactctggcttgcctaaccagtgcggaccgtacaaccgttcaggctgtagcaagcgcaatcggtcgggccattgaggacgaggctcgcttcggtcgtatccgtgaccttgaagctaagcacttcaagaaaaactatgaggaacaactcaacaagcgcgtagggcacgtctacaagaaagcatttatgcaagttgtcgaggctgacatgctctctaagggtctactcggtggcgaggcgtggtcttcgtggcataaggaagactctgtgcatgtaggagtacgctgcatcgagatgctcattgagtcaaccggaatggttagcttacaccgccaaaatgctggcgtagtaggtcaagactctgagactatcgaactcgcacctgaatacgctgaggctatcgcaacccgtgcaggtgcgctggctggcatctctccgatgttccaaccttgcgtagttcctcctaagccgtggactggcattactggtggtggctattgggctaacggtcgtcgtcctctggcgctggtgcgtactcacagtaagaaaggtctgatgcgctacgaagacgtttacatgcctgaggtgtacaaagcgattaacattgcgcaaaacaccgcctggtcgatcaacaagtgggtcctggcggtcgccaacgtaatcaccaagtggaagcattgtccggtccgggacatccctgcgattgagcgtgaagaactcccgatgaaaccggaagacatcgacatgaatcctgaggctctcaccgcgtggaaacgtgctaaagctgctgtgtaccgcagagacaaggctcgcaagtctcgtcgtatcctgcttgagttcatgcttgagcaagccaataagtttgctaaccataaggccatctggttcccttacaacatggactggcgcggtcgtgtttacgctgtgtcaatgttcaacccgcaaggtaacgatatgaccaaaggactgcttacgctggcgaaaggtaaaccaatcggtaaggaaggttactactggctgaaaatccacggtgcaaactgtgcgggtgtcgataaggttccgttccctgagcgcatcaagttcattgaggaaaaccacgagaacatcatggcttgcgctaagtctccactggagaacacttggtgggctgagcaagatagtccgttctgcttccttgcgttctgctttgagtacgctggggtacagcaccacggcctgagctataactgctcccttccgctggcgtttgacgggtcttgctctggcatccagcacttctccgcgatgctccgagatgaggtaggtggtcgcgcggttaacttgcttcctagtgaaaccgttcaggacatctacgggattgttgctaagaaagtcaacgagattctacaagcagacgcaatcaatgggaccgataacgaagtagttaccgtgaccgatgagaacactggtgaaatctctgagaaagtcaagctgggcactaaggcactggctggtcaatggctggcttacggtgttactcgcagtgtgactaagcgttcagtcatgacgctggcttacgggtccaaagagttcggcttccgtcaacaagtgctgcgccacactattcagtgggctattgattccggcaagggtctgatgttcactcagccgaatcaggctgctggatacatggctaagctgatttgggaatctgtgagcgtgacggtggtagctgcggttgaagcaatgaactggcttaagtctgctgctaagctgctggctgctgaggtcaaagataagaagactggagagattcttcgcaagcgttgcgctgtgcattgggtaactcctgatggtttccctgtgtggcaggaatacaagaagcctattcagacgcgcttgaacctgatgttcctcggtcagttccgcttacagcctaccattaacaccaacaaagatagcgagattgatgcacataaacaggagtctggtatcgctcctaactttgtacacagccaagacggtagccaccttcgtaagactgtagtgtgggcacacgagaagtacggaatcgaatcttttgcactgattcacgactccttcggtaccattccggctgacgctgcgaacctgttcaaagcagtgcgcgaaactatggttgacacatatgagtcttgtgatgtactggctgatttctacgaccagttcgctgaccagttgcacgagtctcaattggacaaaatgccagcacttccggctaaaggtaacttgaacctccgtgacatcttagagtcggacttcgcgttcgcg

SEQ ID NO: 562 - protein, 890 aa, synthetic construct
  REGION 1..890: note = Variant of RNA polymerase
MHHHHHHMNTINIAKNDFSDIELAAIPFNTLADHYGEGLAREQLALEHESYEMGEARFRKMFERQLKAGEVADNAAAKPLITTLLPKMIARINDWFEEVKAKRGKRPTAFQFLQEIKPEAVAYITIKTTLACLTSADRTTVQAVASAIGRAIEDEARFGRIRDLEAKHFKKNYEEQLNKRVGHVYKKAFMQVVEADMLSKGLLGGEAWSSWHKEDSVHVGVRCIEMLIESTGMVSLHRQNAGVVGQDSETIELAPEYAEAIATRAGALAGISPMFQPCVVPPKPWTGITGGGYWANGRRPLALVRTHSKKGLMRYEDVYMPEVYKAINIAQNTAWSINKWVLAVANVITKWKHCPVRDIPAIEREELPMKPEDIDMNPEALTAWKRAKAAVYRRDKARKSRRILLEFMLEQANKFANHKAIWFPYNMDWRGRVYAVSMFNPQGNDMTKGLLTLAKGKPIGKEGYYWLKIHGANCAGVDKVPFPERIKFIEENHENIMACAKSPLENTWWAEQDSPFCFLAFCFEYAGVQHHGLSYNCSLPLAFDGSCSGIQHFSAMLRDEVGGRAVNLLPSETVQDIYGIVAKKVNEILQADAINGTDNEVVTVTDENTGEISEKVKLGTKALAGQWLAYGVTRSVTKRSVMTLAYGSKEFGFRQQVLRHTIQWAIDSGKGLMFTQPNQAAGYMAKLIWESVSVTVVAAVEAMNWLKSAAKLLAAEVKDKKTGEILRKRCAVHWVTPDGFPVWQEYKKPIQTRLNLMFLGQFRLQPTINTNKDSEIDAHKQESGIAPNFVHSQDGSHLRKTVVWAHEKYGIESFALIHDSFGTIPADAANLFKAVRETMVDTYESCDVLADFYDQFADQLHESQLDKMPALPAKGNLNLRDILESDFAFA

SEQ ID NO: 563 - DNA, 2670 bp, synthetic construct
  misc_feature 1..2670: note = Variant of RNA polymerase
  source 1..2670: mol_type = other DNA
atgcaccatcaccatcaccatatgaacacgattaacatcgctaagaacgacttctctgacatcgaactggctgctatcccgttcaacactctggctgaccattacggtgagggcttagctcgcgaacagttggcccttgagcatgagtcttacgagatgggtgaagcacgtttccgcatgatgtttgagcgtcaacttaaagctggtgaggttgcggataacgctgccgccaagcctctcatcactaccctactccctaagatgattgcacgcatcaacgactggtttgaggaagtgaaagctaagcgcggcaagcgcccgacagccttccagttcctgcaagaaatcaagccggaagccgtagcgtacatcaccattaagaccactctggcttgcctaaccagtgcggaccgtacaaccgttcaggctgtagcaagcgcaatcggtcgggccattgaggacgaggctcgcttcggtcgtatccgtgaccttgaagctaagcacttcaagaaaaactatgaggaacaactcaacaagcgcgtagggcacgtctacaagaaagcatttatgcaagttgtcgaggctgacatgctctctaagggtctactcggtggcgaggcgtggtcttcgtggcataaggaagactctattcatgtaggagtacgctgcatcgagatgctcattgagtcaaccggaatggttagcttacaccgccaaaatgctggcgtagtaggtcaagactctgagactatcgaactcgcacctgaatacgctgaggctatcgcaacccgtgcaggtgcgctggctggcatctctccgatgttccaaccttgcgtagttcctcctaagccgtggactggcattactggtggtggctattgggctaacggtcgtcgtcctctggcgctggtgcgtactcacagtaagaaaggtctgatgcgctacgaagacgtttacatgcctgaggtgtacaaagcgattaacattgcgcaaaacaccgcctggtcgatcaacaagtgggtcctggcggtcgccaacgtaatcaccaagtggaagcattgtccggtccgggacatccctgcgattgagcgtgaagaactcccgatgaaaccggaagacatcgacatgaatcctgaggctctcaccgcgtggaaacgtgctaaagctgctgtgtaccgcagagacaaggctcgcaagtctcgtcgtatcctgcttgagttcatgcttgagcaagccaataagtttgctaaccataaggccatctggttcccttacaacatggactggcgcggtcgtgtttacgctgtgtcaatgttcaacccgcaaggtaacgatatgaccaaaggactgcttacgctggcgaaaggtaaaccaatcggtaaggaaggttactactggctgaaaatccacggtgcaaactgtgcgggtgtcgataaggttccgttccctgagcgcatcaagttcattgaggaaaaccacgagaacatcatggcttgcgctaagtctccactggagaacacttggtgggctgagcaagatagtccgttctgcttccttgcgttctgctttgagtacgctggggtacagcaccacggcctgagctataactgctcccttccgctggcgtttgacgggtcttgctctggcatccagcacttctccgcgatgctccgagatgaggtaggtggtcgcgcggttaacttgcttcctagtgaaaccgttcaggacatctacgggattgttgctaagaaagtcaacgagattctacaagcagacgcaatcaatgggaccgataacgaagtagttaccgtgaccgatgagaacactggtgaaatctctgagaaagtcaagctgggcactaaggcactggctggtcaatggctggcttacggtgttactcgcagtgtgactaagcgttcagtcatgacgctggcttacgggtccaaagagttcggcttccgtcaacaagtgctgcgccacactattcagtgggctattgattccggcaagggtctgatgttcactcagccgaatcaggctgctggatacatggctaagctgatttgggaatctgtgagcgtgacggtggtagctgcggttgaagcaatgaactggcttaagtctgctgctaagctgctggctgctgaggtcaaagataagaagactggagagattcttcgcaagcgttgcgctgtgcattgggtaactcctgatggtttccctgtgtggcaggaatacaagaagcctattcagacgcgcttgaacctgatgttcctcggtcagttccgcttacagcctaccattaacaccaacaaagatagcgagattgatgcacataaacaggagtctggtatcgctcctaactttgtacacagccaagacggtagccaccttcgtaagactgtagtgtgggcacacgagaagtacggaatcgaatcttttgcactgattcacgactccttcggtaccattccggctgacgctgcgaacctgttcaaagcagtgcgcgaaactatggttgacacatatgagtcttgtgatgtactggctgatttctacgaccagttcgctgaccagttgcacgagtctcaattggacaaaatgccagcacttccggctaaaggtaacttgaacctccgtgacatcttagagtcggacttcgcgttcgcg

SEQ ID NO: 564 - protein, 890 aa, synthetic construct
  REGION 1..890: note = Variant of RNA polymerase
MHHHHHHMNTINIAKNDFSDIELAAIPFNTLADHYGEGLAREQLALEHESYEMGEARFRMMFERQLKAGEVADNAAAKPLITTLLPKMIARINDWFEEVKAKRGKRPTAFQFLQEIKPEAVAYITIKTTLACLTSADRTTVQAVASAIGRAIEDEARFGRIRDLEAKHFKKNYEEQLNKRVGHVYKKAFMQVVEADMLSKGLLGGEAWSSWHKEDSIHVGVRCIEMLIESTGMVSLHRQNAGVVGQDSETIELAPEYAEAIATRAGALAGISPMFQPCVVPPKPWTGITGGGYWANGRRPLALVRTHSKKGLMRYEDVYMPEVYKAINIAQNTAWSINKWVLAVANVITKWKHCPVRDIPAIEREELPMKPEDIDMNPEALTAWKRAKAAVYRRDKARKSRRILLEFMLEQANKFANHKAIWFPYNMDWRGRVYAVSMFNPQGNDMTKGLLTLAKGKPIGKEGYYWLKIHGANCAGVDKVPFPERIKFIEENHENIMACAKSPLENTWWAEQDSPFCFLAFCFEYAGVQHHGLSYNCSLPLAFDGSCSGIQHFSAMLRDEVGGRAVNLLPSETVQDIYGIVAKKVNEILQADAINGTDNEVVTVTDENTGEISEKVKLGTKALAGQWLAYGVTRSVTKRSVMTLAYGSKEFGFRQQVLRHTIQWAIDSGKGLMFTQPNQAAGYMAKLIWESVSVTVVAAVEAMNWLKSAAKLLAAEVKDKKTGEILRKRCAVHWVTPDGFPVWQEYKKPIQTRLNLMFLGQFRLQPTINTNKDSEIDAHKQESGIAPNFVHSQDGSHLRKTVVWAHEKYGIESFALIHDSFGTIPADAANLFKAVRETMVDTYESCDVLADFYDQFADQLHESQLDKMPALPAKGNLNLRDILESDFAFA

SEQ ID NO: 565 - DNA, 2670 bp, synthetic construct
  misc_feature 1..2670: note = Variant of RNA polymerase
  source 1..2670: mol_type = other DNA
atgcaccatcaccatcaccatatgaacacgattaacatcgctaagaacgacttctctgacatcgaactggctgctatcccgttcaacactctggctgaccattacggtgagggcttagctcgcgaacagttggcccttgagcatgagtcttacgagatgggtgaagcacgtttccgcaagatgtttgagcgtcaacttaaagctggtgaggttgcggataacgctgccgccaagcctctcatcactaccctactccctaagatgattgcacgcatcaacgactggtttgaggaagtgaaagctaagcgcggcaagcgcccgacagccttccagttcctgcaagaaatcaagccggaagccgtagcgtacatcaccattaagaccactctggcttgcctaaccagtgcggaccgtacaaccgttcaggctgtagcaagcgcaatcggtcgggccattgaggacgaggctcgcttcggtcgtatccgtgaccttgaagctaagcacttcaagaaaaactatgaggaacaactcaacaagcgcgtagggcacgtctacaagaaagcatttatgcaagttgtcgaggctgacatgctctctaagggtctactcggtggcgaggcgtggtcttcgtggcataaggaagactctattcatgtaggagtacgctgcatcgagatgctcattgagtcaaccggaatggttagcttacaccgccttaatgctggcgtagtaggtcaagactctgagactatcgaactcgcacctgaatacgctgaggctatcgcaacccgtgcaggtgcgctggctggcatctctccgatgttccaaccttgcgtagttcctcctaagccgtggactggcattactggtggtggctattgggctaacggtcgtcgtcctctggcgctggtgcgtactcacagtaagaaaggtctgatgcgctacgaagacgtttacatgcctgaggtgtacaaagcgattaacattgcgcaaaacaccgcctggtcgatcaacaagtgggtcctggcggtcgccaacgtaatcaccaagtggaagcattgtccggtccgggacatccctgcgattgagcgtgaagaactcccgatgaaaccggaagacatcgacatgaatcctgaggctctcaccgcgtggaaacgtgctaaagctgctgtgtaccgcagagacaaggctcgcaagtctcgtcgtatcctgcttgagttcatgcttgagcaagccaataagtttgctaaccataaggccatctggttcccttacaacatggactggcgcggtcgtgtttacgctgtgtcaatgttcaacccgcaaggtaacgatatgaccaaaggactgcttacgctggcgaaaggtaaaccaatcggtaaggaaggttactactggctgaaaatccacggtgcaaactgtgcgggtgtcgataaggttccgttccctgagcgcatcaagttcattgaggaaaaccacgagaacatcatggcttgcgctaagtctccactggagaacacttggtgggctgagcaagatagtccgttctgcttccttgcgttctgctttgagtacgctggggtacagcaccacggcctgagctataactgctcccttccgctggcgtttgacgggtcttgctctggcatccagcacttctccgcgatgctccgagatgaggtaggtggtcgcgcggttaacttgcttcctagtgaaaccgttcaggacatctacgggattgttgctaagaaagtcaacgagattctacaagcagacgcaatcaatgggaccgataacgaagtagttaccgtgaccgatgagaacactggtgaaatctctgagaaagtcaagctgggcactaaggcactggctggtcaatggctggcttacggtgttactcgcagtgtgactaagcgttcagtcatgacgctggcttacgggtccaaagagttcggcttccgtcaacaagtgctgcgccacactattcagtgggctattgattccggcaagggtctgatgttcactcagccgaatcaggctgctggatacatggctaagctgatttgggaatctgtgagcgtgacggtggtagctgcggttgaagcaatgaactggcttaagtctgctgctaagctgctggctgctgaggtcaaagataagaagactggagagattcttcgcaagcgttgcgctgtgcattgggtaactcctgatggtttccctgtgtggcaggaatacaagaagcctattcagacgcgcttgaacctgatgttcctcggtcagttccgcttacagcctaccattaacaccaacaaagatagcgagattgatgcacataaacaggagtctggtatcgctcctaactttgtacacagccaagacggtagccaccttcgtaagactgtagtgtgggcacacgagaagtacggaatcgaatcttttgcactgattcacgactccttcggtaccattccggctgacgctgcgaacctgttcaaagcagtgcgcgaaactatggttgacacatatgagtcttgtgatgtactggctgatttctacgaccagttcgctgaccagttgcacgagtctcaattggacaaaatgccagcacttccggctaaaggtaacttgaacctccgtgacatcttagagtcggacttcgcgttcgcg

SEQ ID NO: 566 - protein, 890 aa, synthetic construct
  REGION 1..890: note = Variant of RNA polymerase
MHHHHHHMNTINIAKNDFSDIELAAIPFNTLADHYGEGLAREQLALEHESYEMGEARFRKMFERQLKAGEVADNAAAKPLITTLLPKMIARINDWFEEVKAKRGKRPTAFQFLQEIKPEAVAYITIKTTLACLTSADRTTVQAVASAIGRAIEDEARFGRIRDLEAKHFKKNYEEQLNKRVGHVYKKAFMQVVEADMLSKGLLGGEAWSSWHKEDSIHVGVRCIEMLIESTGMVSLHRLNAGVVGQDSETIELAPEYAEAIATRAGALAGISPMFQPCVVPPKPWTGITGGGYWANGRRPLALVRTHSKKGLMRYEDVYMPEVYKAINIAQNTAWSINKWVLAVANVITKWKHCPVRDIPAIEREELPMKPEDIDMNPEALTAWKRAKAAVYRRDKARKSRRILLEFMLEQANKFANHKAIWFPYNMDWRGRVYAVSMFNPQGNDMTKGLLTLAKGKPIGKEGYYWLKIHGANCAGVDKVPFPERIKFIEENHENIMACAKSPLENTWWAEQDSPFCFLAFCFEYAGVQHHGLSYNCSLPLAFDGSCSGIQHFSAMLRDEVGGRAVNLLPSETVQDIYGIVAKKVNEILQADAINGTDNEVVTVTDENTGEISEKVKLGTKALAGQWLAYGVTRSVTKRSVMTLAYGSKEFGFRQQVLRHTIQWAIDSGKGLMFTQPNQAAGYMAKLIWESVSVTVVAAVEAMNWLKSAAKLLAAEVKDKKTGEILRKRCAVHWVTPDGFPVWQEYKKPIQTRLNLMFLGQFRLQPTINTNKDSEIDAHKQESGIAPNFVHSQDGSHLRKTVVWAHEKYGIESFALIHDSFGTIPADAANLFKAVRETMVDTYESCDVLADFYDQFADQLHESQLDKMPALPAKGNLNLRDILESDFAFA

SEQ ID NO: 567 - DNA, 2670 bp, synthetic construct
  misc_feature 1..2670: note = Variant of RNA polymerase
  source 1..2670: mol_type = other DNA
atgcaccatcaccatcaccatatgaacacgattaacatcgctaagaacgacttctctgacatcgaactggctgctatcccgttcaacactctggctgaccattacggtgagggcttagctcgcgaacagttggcccttgagcatgagtcttacgagatgggtgaagcacgtttccgcaagatgtttgagcgtcaacttaaagctggtgaggttgcggataactctgccgccaagcctctcatcactaccctactccctaagatgattgcacgcatcaacgactggtttgaggaagtgaaagctaagcgcggcaagcgcccgacagccttccagttcctgcaagaaatcaagccggaagccgtagcgtacatcaccattaagaccactctggcttgcctaaccagtgcggaccgtacaaccgttcaggctgtagcaagcgcaatcggtcgggccattgaggacgaggctcgcttcggtcgtatccgtgaccttgaagctaagcacttcaagaaaaactatgaggaacaactcaacaagcgcgtagggcacgtctacaagaaagcatttatgcaagttgtcgaggctgacatgctctctaagggtctactcggtggcgaggcgtggtcttcgtggcataaggaagactctattcatgtaggagtacgctgcatcgagatgctcattgagtcaaccggaatggttagcttacaccgccaaaatgctggcgtagtaggtcaagactctgagactatcgaactcgcacctgaatacgctgaggctatcgcaacccgtgcaggtgcgctggctggcatctctccgatgttccaaccttgcgtagttcctcctaagccgtggactggcattactggtggtggctattgggctaacggtcgtcgtcctctggcgctggtgcgtactcacagtaagaaaggtctgatgcgctacgaagacgtttacatgcctgaggtgtacaaagcgattaacattgcgcaaaacaccgcctggtcgatcaacaagtgggtcctggcggtcgccaacgtaatcaccaagtggaagcattgtccggtccgggacatccctgcgattgagcgtgaagaactcccgatgaaaccggaagacatcgacatgaatcctgaggctctcaccgcgtggaaacgtgctaaagctgctgtgtaccgcagagacaaggctcgcaagtctcgtcgtatcctgcttgagttcatgcttgagcaagccaataagtttgctaaccataaggccatctggttcccttacaacatggactggcgcggtcgtgtttacgctgtgtcaatgttcaacccgcaaggtaacgatatgaccaaaggactgcttacgctggcgaaaggtaaaccaatcggtaaggaaggttactactggctgaaaatccacggtgcaaactgtgcgggtgtcgataaggttccgttccctgagcgcatcaagttcattgaggaaaaccacgagaacatcatggcttgcgctaagtctccactggagaacacttggtgggctgagcaagatagtccgttctgcttccttgcgttctgctttgagtacgctggggtacagcaccacggcctgagctataactgctcccttccgctggcgtttgacgggtcttgctctggcatccagcacttctccgcgatgctccgagatgaggtaggtggtcgcgcggttaacttgcttcctagtgaaaccgttcaggacatctacgggattgttgctaagaaagtcaacgagattctacaagcagacgcaatcaatgggaccgataacgaagtagttaccgtgaccgatgagaacactggtgaaatctctgagaaagtcaagctgggcactaaggcactggctggtcaatggctggcttacggtgttactcgcagtgtgactaagcgttcagtcatgacgctggcttacgggtccaaagagttcggcttccgtcaacaagtgctgcgccacactattcagtgggctattgattccggcaagggtctgatgttcactcagccgaatcaggctgctggatacatggctaagctgatttgggaatctgtgagcgtgacggtggtagctgcggttgaagcaatgaactggcttaagtctgctgctaagctgctggctgctgaggtcaaagataagaagactggagagattcttcgcaagcgttgcgctgtgcattgggtaactcctgatggtttccctgtgtggcaggaatacaagaagcctattcagacgcgcttgaacctgatgttcctcggtcagttccgcttacagcctaccattaacaccaacaaagatagcgagattgatgcacataaacaggagtctggtatcgctcctaactttgtacacagccaagacggtagccaccttcgtaagactgtagtgtgggcacacgagaagtacggaatcgaatcttttgcactgattcacgactccttcggtaccattccggctgacgctgcgaacctgttcaaagcagtgcgcgaaactatggttgacacatatgagtcttgtgatgtactggctgatttctacgaccagttcgctgaccagttgcacgagtctcaattggacaaaatgccagcacttccggctaaaggtaacttgaacctccgtgacatcttagagtcggacttcgcgttcgcg

SEQ ID NO: 568 - protein, 890 aa, synthetic construct
  REGION 1..890: note = Variant of RNA polymerase
MHHHHHHMNTINIAKNDFSDIELAAIPFNTLADHYGEGLAREQLALEHESYEMGEARFRKMFERQLKAGEVADNSAAKPLITTLLPKMIARINDWFEEVKAKRGKRPTAFQFLQEIKPEAVAYITIKTTLACLTSADRTTVQAVASAIGRAIEDEARFGRIRDLEAKHFKKNYEEQLNKRVGHVYKKAFMQVVEADMLSKGLLGGEAWSSWHKEDSIHVGVRCIEMLIESTGMVSLHRQNAGVVGQDSETIELAPEYAEAIATRAGALAGISPMFQPCVVPPKPWTGITGGGYWANGRRPLALVRTHSKKGLMRYEDVYMPEVYKAINIAQNTAWSINKWVLAVANVITKWKHCPVRDIPAIEREELPMKPEDIDMNPEALTAWKRAKAAVYRRDKARKSRRILLEFMLEQANKFANHKAIWFPYNMDWRGRVYAVSMFNPQGNDMTKGLLTLAKGKPIGKEGYYWLKIHGANCAGVDKVPFPERIKFIEENHENIMACAKSPLENTWWAEQDSPFCFLAFCFEYAGVQHHGLSYNCSLPLAFDGSCSGIQHFSAMLRDEVGGRAVNLLPSETVQDIYGIVAKKVNEILQADAINGTDNEVVTVTDENTGEISEKVKLGTKALAGQWLAYGVTRSVTKRSVMTLAYGSKEFGFRQQVLRHTIQWAIDSGKGLMFTQPNQAAGYMAKLIWESVSVTVVAAVEAMNWLKSAAKLLAAEVKDKKTGEILRKRCAVHWVTPDGFPVWQEYKKPIQTRLNLMFLGQFRLQPTINTNKDSEIDAHKQESGIAPNFVHSQDGSHLRKTVVWAHEKYGIESFALIHDSFGTIPADAANLFKAVRETMVDTYESCDVLADFYDQFADQLHESQLDKMPALPAKGNLNLRDILESDFAFA

SEQ ID NO: 569 - DNA, 2670 bp, synthetic construct
  misc_feature 1..2670: note = Variant of RNA polymerase
  source 1..2670: mol_type = other DNA
atgcaccatcaccatcaccatatgaacacgattaacatcgctaagaacgacttctctgacatcgaactggctgctatcccgttcaacactctgacggaccattacggtgagggcttagctcgcgaacagttggcccttgagcatgagtcttacgagatgggtgaagcacgtttccgcaagatgtttgagcgtcaacttaaagctggtgaggttgcggataacgctgccgccaagcctctcatcactaccctactccctaagatgattgcacgcatcaacgactggtttgaggaagtgaaagctaagcgcggcaagcgcccgacagccttccagttcctgcaagaaatcaagccggaagccgtagcgtacatcaccattaagaccactctggcttgcctaaccagtgcggaccgtacaaccgttcaggctgtagcaagcgcaatcggtcgggccattgaggacgaggctcgcttcggtcgtatccgtgaccttgaagctaagcacttcaagaaaaactatgaggaacaactcaacaagcgcgtagggcacgtctacaagaaagcatttatgcaagttgtcgaggctgacatgctctctaagggtctactcggtggcgaggcgtggtcttcgtggcataaggaagactctattcatgtaggagtacgctgcatcgagatgctcattgagtcaaccggaatggttagcttacaccgccaaaatgctggcgtagtaggtcaagactctgagactatcgaactcgcacctgaatacgctgaggctatcgcaacccgtgcaggtgcgctggctggcatctctccgatgttccaaccttgcgtagttcctcctaagccgtggactggcattactggtggtggctattgggctaacggtcgtcgtcctctggcgctggtgcgtactcacagtaagaaaggtctgatgcgctacgaagacgtttacatgcctgaggtgtacaaagcgattaacattgcgcaaaacaccgcctggtcgatcaacaagtgggtcctggcggtcgccaacgtaatcaccaagtggaagcattgtccggtccgggacatccctgcgattgagcgtgaagaactcccgatgaaaccggaagacatcgacatgaatcctgaggctctcaccgcgtggaaacgtgctaaagctgctgtgtaccgcagagacaaggctcgcaagtctcgtcgtatcctgcttgagttcatgcttgagcaagccaataagtttgctaaccataaggccatctggttcccttacaacatggactggcgcggtcgtgtttacgctgtgtcaatgttcaacccgcaaggtaacgatatgaccaaaggactgcttacgctggcgaaaggtaaaccaatcggtaaggaaggttactactggctgaaaatccacggtgcaaactgtgcgggtgtcgataaggttccgttccctgagcgcatcaagttcattgaggaaaaccacgagaacatcatggcttgcgctaagtctccactggagaacacttggtgggctgagcaagatagtccgttctgcttccttgcgttctgctttgagtacgctggggtacagcaccacggcctgagctataactgctcccttccgctggcgtttgacgggtcttgctctggcatccagcacttctccgcgatgctccgagatgaggtaggtggtcgcgcggttaacttgcttcctagtgaaaccgttcaggacatctacgggattgttgctaagaaagtcaacgagattctacaagcagacgcaatcaatgggaccgataacgaagtagttaccgtgaccgatgagaacactggtgaaatctctgagaaagtcaagctgggcactaaggcactggctggtcaatggctggcttacggtgttactcgcagtgtgactaagcgttcagtcatgacgctggcttacgggtccaaagagttcggcttccgtcaacaagtgctgcgccacactattcagtgggctattgattccggcaagggtctgatgttcactcagccgaatcaggctgctggatacatggctaagctgatttgggaatctgtgagcgtgacggtggtagctgcggttgaagcaatgaactggcttaagtctgctgctaagctgctggctgctgaggtcaaagataagaagactggagagattcttcgcaagcgttgcgctgtgcattgggtaactcctgatggtttccctgtgtggcaggaatacaagaagcctattcagacgcgcttgaacctgatgttcctcggtcagttccgcttacagcctaccattaacaccaacaaagatagcgagattgatgcacataaacaggagtctggtatcgctcctaactttgtacacagccaagacggtagccaccttcgtaagactgtagtgtgggcacacgagaagtacggaatcgaatcttttgcactgattcacgactccttcggtaccattccggctgacgctgcgaacctgttcaaagcagtgcgcgaaactatggttgacacatatgagtcttgtgatgtactggctgatttctacgaccagttcgctgaccagttgcacgagtctcaattggacaaaatgccagcacttccggctaaaggtaacttgaacctccgtgacatcttagagtcggacttcgcgttcgcg

SEQ ID NO: 570 - protein, 890 aa, synthetic construct
  REGION 1..890: note = Variant of RNA polymerase
MHHHHHHMNTINIAKNDFSDIELAAIPFNTLTDHYGEGLAREQLALEHESYEMGEARFRKMFERQLKAGEVADNAAAKPLITTLLPKMIARINDWFEEVKAKRGKRPTAFQFLQEIKPEAVAYITIKTTLACLTSADRTTVQAVASAIGRAIEDEARFGRIRDLEAKHFKKNYEEQLNKRVGHVYKKAFMQVVEADMLSKGLLGGEAWSSWHKEDSIHVGVRCIEMLIESTGMVSLHRQNAGVVGQDSETIELAPEYAEAIATRAGALAGISPMFQPCVVPPKPWTGITGGGYWANGRRPLALVRTHSKKGLMRYEDVYMPEVYKAINIAQNTAWSINKWVLAVANVITKWKHCPVRDIPAIEREELPMKPEDIDMNPEALTAWKRAKAAVYRRDKARKSRRILLEFMLEQANKFANHKAIWFPYNMDWRGRVYAVSMFNPQGNDMTKGLLTLAKGKPIGKEGYYWLKIHGANCAGVDKVPFPERIKFIEENHENIMACAKSPLENTWWAEQDSPFCFLAFCFEYAGVQHHGLSYNCSLPLAFDGSCSGIQHFSAMLRDEVGGRAVNLLPSETVQDIYGIVAKKVNEILQADAINGTDNEVVTVTDENTGEISEKVKLGTKALAGQWLAYGVTRSVTKRSVMTLAYGSKEFGFRQQVLRHTIQWAIDSGKGLMFTQPNQAAGYMAKLIWESVSVTVVAAVEAMNWLKSAAKLLAAEVKDKKTGEILRKRCAVHWVTPDGFPVWQEYKKPIQTRLNLMFLGQFRLQPTINTNKDSEIDAHKQESGIAPNFVHSQDGSHLRKTVVWAHEKYGIESFALIHDSFGTIPADAANLFKAVRETMVDTYESCDVLADFYDQFADQLHESQLDKMPALPAKGNLNLRDILESDFAFA

SEQ ID NO: 571 - DNA, 2670 bp, synthetic construct
  misc_feature 1..2670: note = Variant of RNA polymerase
  source 1..2670: mol_type = other DNA
atgcaccatcaccatcaccatatgaacacgattaacatcgctaagaacgacttcgaggacatcgaactggctgctatcccgttcaacactctggctgaccattacggtgagggcttagctcgcgaacagttggcccttgagcatgagtcttacgagatgggtgaagcacgtttccgcaagatgtttgagcgtcaacttaaagctggtgaggttgcggataacgctgccgccaagcctctcatcactaccctactccctaagatgattgcacgcatcaacgactggtttgaggaagtgaaagctaagcgcggcaagcgcccgacagccttccagttcctgcaagaaatcaagccggaagccgtagcgtacatcaccattaagaccactctggcttgcctaaccagtgcggaccgtacaaccgttcaggctgtagcaagcgcaatcggtcgggccattgaggacgaggctcgcttcggtcgtatccgtgaccttgaagctaagcacttcaagaaaaactatgaggaacaactcaacaagcgcgtagggcacgtctacaagaaagcatttatgcaagttgtcgaggctgacatgctctctaagggtctactcggtggcgaggcgtggtcttcgtggcataaggaagactctattcatgtaggagtacgctgcatcgagatgctcattgagtcaaccggaatggttagcttacaccgccaaaatgctggcgtagtaggtcaagactctgagactatcgaactcgcacctgaatacgctgaggctatcgcaacccgtgcaggtgcgctggctggcatctctccgatgttccaaccttgcgtagttcctcctaagccgtggactggcattactggtggtggctattgggctaacggtcgtcgtcctctggcgctggtgcgtactcacagtaagaaaggtctgatgcgctacgaagacgtttacatgcctgaggtgtacaaagcgattaacattgcgcaaaacaccgcctggtcgatcaacaagtgggtcctggcggtcgccaacgtaatcaccaagtggaagcattgtccggtccgggacatccctgcgattgagcgtgaagaactcccgatgaaaccggaagacatcgacatgaatcctgaggctctcaccgcgtggaaacgtgctaaagctgctgtgtaccgcagagacaaggctcgcaagtctcgtcgtatcctgcttgagttcatgcttgagcaagccaataagtttgctaaccataaggccatctggttcccttacaacatggactggcgcggtcgtgtttacgctgtgtcaatgttcaacccgcaaggtaacgatatgaccaaaggactgcttacgctggcgaaaggtaaaccaatcggtaaggaaggttactactggctgaaaatccacggtgcaaactgtgcgggtgtcgataaggttccgttccctgagcgcatcaagttcattgaggaaaaccacgagaacatcatggcttgcgctaagtctccactggagaacacttggtgggctgagcaagatagtccgttctgcttccttgcgttctgctttgagtacgctggggtacagcaccacggcctgagctataactgctcccttccgctggcgtttgacgggtcttgctctggcatccagcacttctccgcgatgctccgagatgaggtaggtggtcgcgcggttaacttgcttcctagtgaaaccgttcaggacatctacgggattgttgctaagaaagtcaacgagattctacaagcagacgcaatcaatgggaccgataacgaagtagttaccgtgaccgatgagaacactggtgaaatctctgagaaagtcaagctgggcactaaggcactggctggtcaatggctggcttacggtgttactcgcagtgtgactaagcgttcagtcatgacgctggcttacgggtccaaagagttcggcttccgtcaacaagtgctgcgccacactattcagtgggctattgattccggcaagggtctgatgttcactcagccgaatcaggctgctggatacatggctaagctgatttgggaatctgtgagcgtgacggtggtagctgcggttgaagcaatgaactggcttaagtctgctgctaagctgctggctgctgaggtcaaagataagaagactggagagattcttcgcaagcgttgcgctgtgcattgggtaactcctgatggtttccctgtgtggcaggaatacaagaagcctattcagacgcgcttgaacctgatgttcctcggtcagttccgcttacagcctaccattaacaccaacaaagatagcgagattgatgcacataaacaggagtctggtatcgctcctaactttgtacacagccaagacggtagccaccttcgtaagactgtagtgtgggcacacgagaagtacggaatcgaatcttttgcactgattcacgactccttcggtaccattccggctgacgctgcgaacctgttcaaagcagtgcgcgaaactatggttgacacatatgagtcttgtgatgtactggctgatttctacgaccagttcgctgaccagttgcacgagtctcaattggacaaaatgccagcacttccggctaaaggtaacttgaacctccgtgacatcttagagtcggacttcgcgttcgcg

SEQ ID NO: 572 - protein, 890 aa, synthetic construct
  REGION 1..890: note = Variant of RNA polymerase
MHHHHHHMNTINIAKNDFEDIELAAIPFNTLADHYGEGLAREQLALEHESYEMGEARFRKMFERQLKAGEVADNAAAKPLITTLLPKMIARINDWFEEVKAKRGKRPTAFQFLQEIKPEAVAYITIKTTLACLTSADRTTVQAVASAIGRAIEDEARFGRIRDLEAKHFKKNYEEQLNKRVGHVYKKAFMQVVEADMLSKGLLGGEAWSSWHKEDSIHVGVRCIEMLIESTGMVSLHRQNAGVVGQDSETIELAPEYAEAIATRAGALAGISPMFQPCVVPPKPWTGITGGGYWANGRRPLALVRTHSKKGLMRYEDVYMPEVYKAINIAQNTAWSINKWVLAVANVITKWKHCPVRDIPAIEREELPMKPEDIDMNPEALTAWKRAKAAVYRRDKARKSRRILLEFMLEQANKFANHKAIWFPYNMDWRGRVYAVSMFNPQGNDMTKGLLTLAKGKPIGKEGYYWLKIHGANCAGVDKVPFPERIKFIEENHENIMACAKSPLENTWWAEQDSPFCFLAFCFEYAGVQHHGLSYNCSLPLAFDGSCSGIQHFSAMLRDEVGGRAVNLLPSETVQDIYGIVAKKVNEILQADAINGTDNEVVTVTDENTGEISEKVKLGTKALAGQWLAYGVTRSVTKRSVMTLAYGSKEFGFRQQVLRHTIQWAIDSGKGLMFTQPNQAAGYMAKLIWESVSVTVVAAVEAMNWLKSAAKLLAAEVKDKKTGEILRKRCAVHWVTPDGFPVWQEYKKPIQTRLNLMFLGQFRLQPTINTNKDSEIDAHKQESGIAPNFVHSQDGSHLRKTVVWAHEKYGIESFALIHDSFGTIPADAANLFKAVRETMVDTYESCDVLADFYDQFADQLHESQLDKMPALPAKGNLNLRDILESDFAFA

SEQ ID NO: 573 - DNA, 2670 bp, synthetic construct
  misc_feature 1..2670: note = Variant of RNA polymerase
  source 1..2670: mol_type = other DNA
atgcaccatcaccatcaccatatgaacacgattaacatcgctaagaacgacttctctgacatcgaactggctgctatcccgttcaacactctggctgaccattacggtgagggcttagctcgcgaacagttggcccttgagcatgagtcttacgagatgggtgaagcacgtttccgcaagatgtttgagcgtcaacttaaagctggtgaggttgcggataacgctgccgccaagcctctcatcactaccctactccctaagatgattgcacgcatcaacgactattttgaggaagtgaaagctaagcgcggcaagcgcccgacagccttccagttcctgcaagaaatcaagccggaagccgtagcgtacatcaccattaagaccactctggcttgcctaaccagtgcggaccgtacaaccgttcaggctgtagcaagcgcaatcggtcgggccattgaggacgaggctcgcttcggtcgtatccgtgaccttgaagctaagcacttcaagaaaaactatgaggaacaactcaacaagcgcgtagggcacgtctacaagaaagcatttatgcaagttgtcgaggctgacatgctctctaagggtctactcggtggcgaggcgtggtcttcgtggcataaggaagactctattcatgtaggagtacgctgcatcgagatgctcattgagtcaaccggaatggttagcttacaccgccaaaatgctggcgtagtaggtcaagactctgagactatcgaactcgcacctgaatacgctgaggctatcgcaacccgtgcaggtgcgctggctggcatctctccgatgttccaaccttgcgtagttcctcctaagccgtggactggcattactggtggtggctattgggctaacggtcgtcgtcctctggcgctggtgcgtactcacagtaagaaaggtctgatgcgctacgaagacgtttacatgcctgaggtgtacaaagcgattaacattgcgcaaaacaccgcctggtcgatcaacaagtgggtcctggcggtcgccaacgtaatcaccaagtggaagcattgtccggtccgggacatccctgcgattgagcgtgaagaactcccgatgaaaccggaagacatcgacatgaatcctgaggctctcaccgcgtggaaacgtgctaaagctgctgtgtaccgcagagacaaggctcgcaagtctcgtcgtatcctgcttgagttcatgcttgagcaagccaataagtttgctaaccataaggccatctggttcccttacaacatggactggcgcggtcgtgtttacgctgtgtcaatgttcaacccgcaaggtaacgatatgaccaaaggactgcttacgctggcgaaaggtaaaccaatcggtaaggaaggttactactggctgaaaatccacggtgcaaactgtgcgggtgtcgataaggttccgttccctgagcgcatcaagttcattgaggaaaaccacgagaacatcatggcttgcgctaagtctccactggagaacacttggtgggctgagcaagatagtccgttctgcttccttgcgttctgctttgagtacgctggggtacagcaccacggcctgagctataactgctcccttccgctggcgtttgacgggtcttgctctggcatccagcacttctccgcgatgctccgagatgaggtaggtggtcgcgcggttaacttgcttcctagtgaaaccgttcaggacatctacgggattgttgctaagaaagtcaacgagattctacaagcagacgcaatcaatgggaccgataacgaagtagttaccgtgaccgatgagaacactggtgaaatctctgagaaagtcaagctgggcactaaggcactggctggtcaatggctggcttacggtgttactcgcagtgtgactaagcgttcagtcatgacgctggcttacgggtccaaagagttcggcttccgtcaacaagtgctgcgccacactattcagtgggctattgattccggcaagggtctgatgttcactcagccgaatcaggctgctggatacatggctaagctgatttgggaatctgtgagcgtgacggtggtagctgcggttgaagcaatgaactggcttaagtctgctgctaagctgctggctgctgaggtcaaagataagaagactggagagattcttcgcaagcgttgcgctgtgcattgggtaactcctgatggtttccctgtgtggcaggaatacaagaagcctattcagacgcgcttgaacctgatgttcctcggtcagttccgcttacagcctaccattaacaccaacaaagatagcgagattgatgcacataaacaggagtctggtatcgctcctaactttgtacacagccaagacggtagccaccttcgtaagactgtagtgtgggcacacgagaagtacggaatcgaatcttttgcactgattcacgactccttcggtaccattccggctgacgctgcgaacctgttcaaagcagtgcgcgaaactatggttgacacatatgagtcttgtgatgtactggctgatttctacgaccagttcgctgaccagttgcacgagtctcaattggacaaaatgccagcacttccggctaaaggtaacttgaacctccgtgacatcttagagtcggacttcgcgttcgcg

SEQ ID NO: 574 - protein, 890 aa, synthetic construct
  REGION 1..890: note = Variant of RNA polymerase
MHHHHHHMNTINIAKNDFSDIELAAIPFNTLADHYGEGLAREQLALEHESYEMGEARFRKMFERQLKAGEVADNAAAKPLITTLLPKMIARINDYFEEVKAKRGKRPTAFQFLQEIKPEAVAYITIKTTLACLTSADRTTVQAVASAIGRAIEDEARFGRIRDLEAKHFKKNYEEQLNKRVGHVYKKAFMQVVEADMLSKGLLGGEAWSSWHKEDSIHVGVRCIEMLIESTGMVSLHRQNAGVVGQDSETIELAPEYAEAIATRAGALAGISPMFQPCVVPPKPWTGITGGGYWANGRRPLALVRTHSKKGLMRYEDVYMPEVYKAINIAQNTAWSINKWVLAVANVITKWKHCPVRDIPAIEREELPMKPEDIDMNPEALTAWKRAKAAVYRRDKARKSRRILLEFMLEQANKFANHKAIWFPYNMDWRGRVYAVSMFNPQGNDMTKGLLTLAKGKPIGKEGYYWLKIHGANCAGVDKVPFPERIKFIEENHENIMACAKSPLENTWWAEQDSPFCFLAFCFEYAGVQHHGLSYNCSLPLAFDGSCSGIQHFSAMLRDEVGGRAVNLLPSETVQDIYGIVAKKVNEILQADAINGTDNEVVTVTDENTGEISEKVKLGTKALAGQWLAYGVTRSVTKRSVMTLAYGSKEFGFRQQVLRHTIQWAIDSGKGLMFTQPNQAAGYMAKLIWESVSVTVVAAVEAMNWLKSAAKLLAAEVKDKKTGEILRKRCAVHWVTPDGFPVWQEYKKPIQTRLNLMFLGQFRLQPTINTNKDSEIDAHKQESGIAPNFVHSQDGSHLRKTVVWAHEKYGIESFALIHDSFGTIPADAANLFKAVRETMVDTYESCDVLADFYDQFADQLHESQLDKMPALPAKGNLNLRDILESDFAFA

SEQ ID NO: 575 - DNA, 2670 bp, synthetic construct
  misc_feature 1..2670: note = Variant of RNA polymerase
  source 1..2670: mol_type = other DNA
atgcaccatcaccatcaccatatgaacacgattaacatcgctaagaacgacttctctgacatcgaactggctgctatcccgttcaacactctggctgaccattacggtgagggcttagctcgcgaacagttggcccttgagcatgagtcttacgagatgggtgaagcacgtttccgcaagatgtttgagcgtcaacttaaagctggtgaggttgcggataacgctgccgccaagcctctccttactaccctactccctaagatgattgcacgcatcaacgactggtttgaggaagtgaaagctaagcgcggcaagcgcccgacagccttccagttcctgcaagaaatcaagccggaagccgtagcgtacatcaccattaagaccactctggcttgcctaaccagtgcggaccgtacaaccgttcaggctgtagcaagcgcaatcggtcgggccattgaggacgaggctcgcttcggtcgtatccgtgaccttgaagctaagcacttcaagaaaaactatgaggaacaactcaacaagcgcgtagggcacgtctacaagaaagcatttatgcaagttgtcgaggctgacatgctctctaagggtctactcggtggcgaggcgtggtcttcgtggcataaggaagactctattcatgtaggagtacgctgcatcgagatgctcattgagtcaaccggaatggttagcttacaccgccaaaatgctggcgtagtaggtcaagactctgagactatcgaactcgcacctgaatacgctgaggctatcgcaacccgtgcaggtgcgctggctggcatctctccgatgttccaaccttgcgtagttcctcctaagccgtggactggcattactggtggtggctattgggctaacggtcgtcgtcctctggcgctggtgcgtactcacagtaagaaaggtctgatgcgctacgaagacgtttacatgcctgaggtgtacaaagcgattaacattgcgcaaaacaccgcctggtcgatcaacaagtgggtcctggcggtcgccaacgtaatcaccaagtggaagcattgtccggtccgggacatccctgcgattgagcgtgaagaactcccgatgaaaccggaagacatcgacatgaatcctgaggctctcaccgcgtggaaacgtgctaaagctgctgtgtaccgcagagacaaggctcgcaagtctcgtcgtatcctgcttgagttcatgcttgagcaagccaataagtttgctaaccataaggccatctggttcccttacaacatggactggcgcggtcgtgtttacgctgtgtcaatgttcaacccgcaaggtaacgatatgaccaaaggactgcttacgctggcgaaaggtaaaccaatcggtaaggaaggttactactggctgaaaatccacggtgcaaactgtgcgggtgtcgataaggttccgttccctgagcgcatcaagttcattgaggaaaaccacgagaacatcatggcttgcgctaagtctccactggagaacacttggtgggctgagcaagatagtccgttctgcttccttgcgttctgctttgagtacgctggggtacagcaccacggcctgagctataactgctcccttccgctggcgtttgacgggtcttgctctggcatccagcacttctccgcgatgctccgagatgaggtaggtggtcgcgcggttaacttgcttcctagtgaaaccgttcaggacatctacgggattgttgctaagaaagtcaacgagattctacaagcagacgcaatcaatgggaccgataacgaagtagttaccgtgaccgatgagaacactggtgaaatctctgagaaagtcaagctgggcactaaggcactggctggtcaatggctggcttacggtgttactcgcagtgtgactaagcgttcagtcatgacgctggcttacgggtccaaagagttcggcttccgtcaacaagtgctgcgccacactattcagtgggctattgattccggcaagggtctgatgttcactcagccgaatcaggctgctggatacatggctaagctgatttgggaatctgtgagcgtgacggtggtagctgcggttgaagcaatgaactggcttaagtctgctgctaagctgctggctgctgaggtcaaagataagaagactggagagattcttcgcaagcgttgcgctgtgcattgggtaactcctgatggtttccctgtgtggcaggaatacaagaagcctattcagacgcgcttgaacctgatgttcctcggtcagttccgcttacagcctaccattaacaccaacaaagatagcgagattgatgcacataaacaggagtctggtatcgctcctaactttgtacacagccaagacggtagccaccttcgtaagactgtagtgtgggcacacgagaagtacggaatcgaatcttttgcactgattcacgactccttcggtaccattccggctgacgctgcgaacctgttcaaagcagtgcgcgaaactatggttgacacatatgagtcttgtgatgtactggctgatttctacgaccagttcgctgaccagttgcacgagtctcaattggacaaaatgccagcacttccggctaaaggtaacttgaacctccgtgacatcttagagtcggacttcgcgttcgcg

SEQ ID NO: 576 - protein, 890 aa, synthetic construct
  REGION 1..890: note = Variant of RNA polymerase
MHHHHHHMNTINIAKNDFSDIELAAIPFNTLADHYGEGLAREQLALEHESYEMGEARFRKMFERQLKAGEVADNAAAKPLLTTLLPKMIARINDWFEEVKAKRGKRPTAFQFLQEIKPEAVAYITIKTTLACLTSADRTTVQAVASAIGRAIEDEARFGRIRDLEAKHFKKNYEEQLNKRVGHVYKKAFMQVVEADMLSKGLLGGEAWSSWHKEDSIHVGVRCIEMLIESTGMVSLHRQNAGVVGQDSETIELAPEYAEAIATRAGALAGISPMFQPCVVPPKPWTGITGGGYWANGRRPLALVRTHSKKGLMRYEDVYMPEVYKAINIAQNTAWSINKWVLAVANVITKWKHCPVRDIPAIEREELPMKPEDIDMNPEALTAWKRAKAAVYRRDKARKSRRILLEFMLEQANKFANHKAIWFPYNMDWRGRVYAVSMFNPQGNDMTKGLLTLAKGKPIGKEGYYWLKIHGANCAGVDKVPFPERIKFIEENHENIMACAKSPLENTWWAEQDSPFCFLAFCFEYAGVQHHGLSYNCSLPLAFDGSCSGIQHFSAMLRDEVGGRAVNLLPSETVQDIYGIVAKKVNEILQADAINGTDNEVVTVTDENTGEISEKVKLGTKALAGQWLAYGVTRSVTKRSVMTLAYGSKEFGFRQQVLRHTIQWAIDSGKGLMFTQPNQAAGYMAKLIWESVSVTVVAAVEAMNWLKSAAKLLAAEVKDKKTGEILRKRCAVHWVTPDGFPVWQEYKKPIQTRLNLMFLGQFRLQPTINTNKDSEIDAHKQESGIAPNFVHSQDGSHLRKTVVWAHEKYGIESFALIHDSFGTIPADAANLFKAVRETMVDTYESCDVLADFYDQFADQLHESQLDKMPALPAKGNLNLRDILESDFAFA

SEQ ID NO: 577 - DNA, 2670 bp, synthetic construct
  misc_feature 1..2670: note = Variant of RNA polymerase
  source 1..2670: mol_type = other DNA
atgcaccatcaccatcaccatatgaacacgattaacatcgctaagaacgacttctctgacatcgaactggctgctatcccgttcaacactctggctgaccattacggtgagggcttagctcgcgaacagttggcccttgagcatgagtcttacgagatgggtgaagcacgtttccgccgtatgtttgagcgtcaacttaaagctggtgaggttgcggataacgctgccgccaagcctctcatcactaccctactccctaagatgattgcacgcatcaacgactggtttgaggaagtgaaagctaagcgcggcaagcgcccgacagccttccagttcctgcaagaaatcaagccggaagccgtagcgtacatcaccattaagaccactctggcttgcctaaccagtgcggaccgtacaaccgttcaggctgtagcaagcgcaatcggtcgggccattgaggacgaggctcgcttcggtcgtatccgtgaccttgaagctaagcacttcaagaaaaactatgaggaacaactcaacaagcgcgtagggcacgtctacaagaaagcatttatgcaagttgtcgaggctgacatgctctctaagggtctactcggtggcgaggcgtggtcttcgtggcataaggaagactctattcatgtaggagtacgctgcatcgagatgctcattgagtcaaccggaatggttagcttacaccgccaaaatgctggcgtagtaggtcaagactctgagactatcgaactcgcacctgaatacgctgaggctatcgcaacccgtgcaggtgcgctggctggcatctctccgatgttccaaccttgcgtagttcctcctaagccgtggactggcattactggtggtggctattgggctaacggtcgtcgtcctctggcgctggtgcgtactcacagtaagaaaggtctgatgcgctacgaagacgtttacatgcctgaggtgtacaaagcgattaacattgcgcaaaacaccgcctggtcgatcaacaagtgggtcctggcggtcgccaacgtaatcaccaagtggaagcattgtccggtccgggacatccctgcgattgagcgtgaagaactcccgatgaaaccggaagacatcgacatgaatcctgaggctctcaccgcgtggaaacgtgctaaagctgctgtgtaccgcagagacaaggctcgcaagtctcgtcgtatcctgcttgagttcatgcttgagcaagccaataagtttgctaaccataaggccatctggttcccttacaacatggactggcgcggtcgtgtttacgctgtgtcaatgttcaacccgcaaggtaacgatatgaccaaaggactgcttacgctggcgaaaggtaaaccaatcggtaaggaaggttactactggctgaaaatccacggtgcaaactgtgcgggtgtcgataaggttccgttccctgagcgcatcaagttcattgaggaaaaccacgagaacatcatggcttgcgctaagtctccactggagaacacttggtgggctgagcaagatagtccgttctgcttccttgcgttctgctttgagtacgctggggtacagcaccacggcctgagctataactgctcccttccgctggcgtttgacgggtcttgctctggcatccagcacttctccgcgatgctccgagatgaggtaggtggtcgcgcggttaacttgcttcctagtgaaaccgttcaggacatctacgggattgttgctaagaaagtcaacgagattctacaagcagacgcaatcaatgggaccgataacgaagtagttaccgtgaccgatgagaacactggtgaaatctctgagaaagtcaagctgggcactaaggcactggctggtcaatggctggcttacggtgttactcgcagtgtgactaagcgttcagtcatgacgctggcttacgggtccaaagagttcggcttccgtcaacaagtgctgcgccacactattcagtgggctattgattccggcaagggtctgatgttcactcagccgaatcaggctgctggatacatggctaagctgatttgggaatctgtgagcgtgacggtggtagctgcggttgaagcaatgaactggcttaagtctgctgctaagctgctggctgctgaggtcaaagataagaagactggagagattcttcgcaagcgttgcgctgtgcattgggtaactcctgatggtttccctgtgtggcaggaatacaagaagcctattcagacgcgcttgaacctgatgttcctcggtcagttccgcttacagcctaccattaacaccaacaaagatagcgagattgatgcacataaacaggagtctggtatcgctcctaactttgtacacagccaagacggtagccaccttcgtaagactgtagtgtgggcacacgagaagtacggaatcgaatcttttgcactgattcacgactccttcggtaccattccggctgacgctgcgaacctgttcaaagcagtgcgcgaaactatggttgacacatatgagtcttgtgatgtactggctgatttctacgaccagttcgctgaccagttgcacgagtctcaattggacaaaatgccagcacttccggctaaaggtaacttgaacctccgtgacatcttagagtcggacttcgcgttcgcg

SEQ ID NO: 578 - protein, 890 aa, synthetic construct
  REGION 1..890: note = Variant of RNA polymerase
MHHHHHHMNTINIAKNDFSDIELAAIPFNTLADHYGEGLAREQLALEHESYEMGEARFRRMFERQLKAGEVADNAAAKPLITTLLPKMIARINDWFEEVKAKRGKRPTAFQFLQEIKPEAVAYITIKTTLACLTSADRTTVQAVASAIGRAIEDEARFGRIRDLEAKHFKKNYEEQLNKRVGHVYKKAFMQVVEADMLSKGLLGGEAWSSWHKEDSIHVGVRCIEMLIESTGMVSLHRQNAGVVGQDSETIELAPEYAEAIATRAGALAGISPMFQPCVVPPKPWTGITGGGYWANGRRPLALVRTHSKKGLMRYEDVYMPEVYKAINIAQNTAWSINKWVLAVANVITKWKHCPVRDIPAIEREELPMKPEDIDMNPEALTAWKRAKAAVYRRDKARKSRRILLEFMLEQANKFANHKAIWFPYNMDWRGRVYAVSMFNPQGNDMTKGLLTLAKGKPIGKEGYYWLKIHGANCAGVDKVPFPERIKFIEENHENIMACAKSPLENTWWAEQDSPFCFLAFCFEYAGVQHHGLSYNCSLPLAFDGSCSGIQHFSAMLRDEVGGRAVNLLPSETVQDIYGIVAKKVNEILQADAINGTDNEVVTVTDENTGEISEKVKLGTKALAGQWLAYGVTRSVTKRSVMTLAYGSKEFGFRQQVLRHTIQWAIDSGKGLMFTQPNQAAGYMAKLIWESVSVTVVAAVEAMNWLKSAAKLLAAEVKDKKTGEILRKRCAVHWVTPDGFPVWQEYKKPIQTRLNLMFLGQFRLQPTINTNKDSEIDAHKQESGIAPNFVHSQDGSHLRKTVVWAHEKYGIESFALIHDSFGTIPADAANLFKAVRETMVDTYESCDVLADFYDQFADQLHESQLDKMPALPAKGNLNLRDILESDFAFA

SEQ ID NO: 579 - DNA, 2670 bp, synthetic construct
  misc_feature 1..2670: note = Variant of RNA polymerase
  source 1..2670: mol_type = other DNA
atgcaccatcaccatcaccatatgaacacgattaacatcgctaagaacgacttctctgacatcgaactggctgctatcccgttcaacactctggctgaccattacggtgagggcttagctcgcgaacagttggcccttgagcatgagtcttacgagatgggtgaagcacgtttccgcaagatgtttgagcgtcaacttaaagctggtgaggttgcggataacgctgccgccaagcctctcatcactaccctactccctaagatgattgcacgcatcaacgactggtttgaggaagtgaaagctaagcgcggcaagcgcccgacagccttccagttcctgcaagaaatcaagccggaagccgtagcgtacatcaccattaagaccactctggcttgcctaaccagtgcggaccgtacaaccgttcaggctgtagcaagcgcaatcggtcgggccattgaggacgaggctcgcttcggtcgtatccgtgaccttgaagctaagcacttcaagaaaaactatgaggaacaactcaacaagcgcgtagggcacgtctacaagaaagcatttatgcaagttgtcgaggctgacatgctctctaagggtctactcggtggcgaggcgtggtcttcgtggcataaggaagactctattcatgtaggagtacgctgcatcgagatgctcattgagtcaaccggaatggttagcttacaccgccaaaatgctggcgtagtaggtcaagactctgagactatcgaactcgcacctgaatacgctgaggctatcgcaacccgtgcaggtgcgctggctggcatctctccgatgttccaaccttgcgtagttcctcctaagccgtggactggcattactggtggtggctattgggctaacggtcgtcgtcctctggcgctggtgcgtactcacagtaagaaaggtctgatgcgctacgaagacgtttacatgcctgaggtgtacaaagcgattaacattgcgcaaaacaccgcctggtcgatcaacaagtgggtcctggcggtcgccaacgtaatcaccaagtggaagcattgtccggtccgggacatccctgcgattgagcgtgaagaactcccgatgaaaccggaagacatcgacatgaatcctgaggctctcaccgcgtggaaacgtgctaaagctgctgtgtaccgcagagacaaggctcgcaagtctcgtcgtatcctgcttgagttcatgcttgagcaagccaataagtttgctaaccataaggccatctggttcccttacaacatggactggcgcggtcgtgtttacgctgtgtcaatgttcaacccgcaaggtaacgatatgaccaaaggactgcttacgctggcgaaaggtaaaccaatcggtaaggaaggttactactggctgaaaatccacggtgcaaactgtgcgggtgtcgataaggttccgttccctgagcgcatcaagttcattgaggaaaaccacgagaacatcatggcttgcgctaagtctccactggagaacacttggtgggctgagcaagatagtccgttctgcttccttgcgttctgctttgagtacgctggggtacagcaccacggcctgagctataactgctcccttccgctggcgtttgacgggtcttgctctggcatccagcacttctccgcgatgctccgagatgaggtaggtggtcgcgcggttaacttgcttcctagtgaaaccgttcaggacatctacgggattgttgctaagaaagtcaacgagattctacaagcagacgcaatcaatgggaccgataacgaagtagttaccgtgaccgatgagaacactggtgaaatctctgagaaagtcaagctgggcactaaggcactggctggtcaatggctggcttacggtgttactcgcagtgtgactaagcgttcagtcatgacgctggcttacgggtccaaagagttcggcttccgtcaacaagtgctgcgccacactattcagtgggctattgattccggcaagggtctgatgttcactcagccgaatcaggctgctggatacatggctaagctgatttgggaatctgtgagcgtgacggtggtagctgcggttgaagcaatgaactggcttaagtctgctgctaagctgctggctgctgaggtcaaagataagaagactggagagattcttcgcaagcgttgcgctgtgcattgggtaactcctgatggtttccctgtgtggcaggaatacaagaagcctattcagacgcgcttgaacctgatgttcatgggtcagttccgcttacagcctaccattaacaccaacaaagatagcgagattgatgcacataaacaggagtctggtatcgctcctaactttgtacacagccaagacggtagccaccttcgtaagactgtagtgtgggcacacgagaagtacggaatcgaatcttttgcactgattcacgactccttcggtaccattccggctgacgctgcgaacctgttcaaagcagtgcgcgaaactatggttgacacatatgagtcttgtgatgtactggctgatttctacgaccagttcgctgaccagttgcacgagtctcaattggacaaaatgccagcacttccggctaaaggtaacttgaacctccgtgacatcttagagtcggacttcgcgttcgcg

SEQ ID NO: 580 - protein, 890 aa, synthetic construct
  REGION 1..890: note = Variant of RNA polymerase
MHHHHHHMNTINIAKNDFSDIELAAIPFNTLADHYGEGLAREQLALEHESYEMGEARFRKMFERQLKAGEVADNAAAKPLITTLLPKMIARINDWFEEVKAKRGKRPTAFQFLQEIKPEAVAYITIKTTLACLTSADRTTVQAVASAIGRAIEDEARFGRIRDLEAKHFKKNYEEQLNKRVGHVYKKAFMQVVEADMLSKGLLGGEAWSSWHKEDSIHVGVRCIEMLIESTGMVSLHRQNAGVVGQDSETIELAPEYAEAIATRAGALAGISPMFQPCVVPPKPWTGITGGGYWANGRRPLALVRTHSKKGLMRYEDVYMPEVYKAINIAQNTAWSINKWVLAVANVITKWKHCPVRDIPAIEREELPMKPEDIDMNPEALTAWKRAKAAVYRRDKARKSRRILLEFMLEQANKFANHKAIWFPYNMDWRGRVYAVSMFNPQGNDMTKGLLTLAKGKPIGKEGYYWLKIHGANCAGVDKVPFPERIKFIEENHENIMACAKSPLENTWWAEQDSPFCFLAFCFEYAGVQHHGLSYNCSLPLAFDGSCSGIQHFSAMLRDEVGGRAVNLLPSETVQDIYGIVAKKVNEILQADAINGTDNEVVTVTDENTGEISEKVKLGTKALAGQWLAYGVTRSVTKRSVMTLAYGSKEFGFRQQVLRHTIQWAIDSGKGLMFTQPNQAAGYMAKLIWESVSVTVVAAVEAMNWLKSAAKLLAAEVKDKKTGEILRKRCAVHWVTPDGFPVWQEYKKPIQTRLNLMFMGQFRLQPTINTNKDSEIDAHKQESGIAPNFVHSQDGSHLRKTVVWAHEKYGIESFALIHDSFGTIPADAANLFKAVRETMVDTYESCDVLADFYDQFADQLHESQLDKMPALPAKGNLNLRDILESDFAFA

SEQ ID NO: 581 - DNA, 2670 bp, synthetic construct
  misc_feature 1..2670: note = Variant of RNA polymerase
  source 1..2670: mol_type = other DNA
atgcaccatcaccatcaccatatgaacacgattaacatcgctaagaacgacttctctgacatcgaactggctgctatcccgttcaacactctggctgaccattacggtgagggcttagctcgcgaacagttggcccttgagcatgagtcttacgagatgggtgaagcacgtttccgcaagatgacggagcgtcaacttaaagctggtgaggttgcggataacgctgccgccaagcctctcatcactaccctactccctaagatgattgcacgcatcaacgactggtttgaggaagtgaaagctaagcgcggcaagcgcccgacagccttccagttcctgcaagaaatcaagccggaagccgtagcgtacatcaccattaagaccactctggcttgcctaaccagtgcggaccgtacaaccgttcaggctgtagcaagcgcaatcggtcgggccattgaggacgaggctcgcttcggtcgtatccgtgaccttgaagctaagcacttcaagaaaaactatgaggaacaactcaacaagcgcgtagggcacgtctacaagaaagcatttatgcaagttgtcgaggctgacatgctctctaagggtctactcggtggcgaggcgtggtcttcgtggcataaggaagactctattcatgtaggagtacgctgcatcgagatgctcattgagtcaaccggaatggttagcttacaccgccaaaatgctggcgtagtaggtcaagactctgagactatcgaactcgcacctgaatacgctgaggctatcgcaacccgtgcaggtgcgctggctggcatctctccgatgttccaaccttgcgtagttcctcctaagccgtggactggcattactggtggtggctattgggctaacggtcgtcgtcctctggcgctggtgcgtactcacagtaagaaaggtctgatgcgctacgaagacgtttacatgcctgaggtgtacaaagcgattaacattgcgcaaaacaccgcctggtcgatcaacaagtgggtcctggcggtcgccaacgtaatcaccaagtggaagcattgtccggtccgggacatccctgcgattgagcgtgaagaactcccgatgaaaccggaagacatcgacatgaatcctgaggctctcaccgcgtggaaacgtgctaaagctgctgtgtaccgcagagacaaggctcgcaagtctcgtcgtatcctgcttgagttcatgcttgagcaagccaataagtttgctaaccataaggccatctggttcccttacaacatggactggcgcggtcgtgtttacgctgtgtcaatgttcaacccgcaaggtaacgatatgaccaaaggactgcttacgctggcgaaaggtaaaccaatcggtaaggaaggttactactggctgaaaatccacggtgcaaactgtgcgggtgtcgataaggttccgttccctgagcgcatcaagttcattgaggaaaaccacgagaacatcatggcttgcgctaagtctccactggagaacacttggtgggctgagcaagatagtccgttctgcttccttgcgttctgctttgagtacgctggggtacagcaccacggcctgagctataactgctcccttccgctggcgtttgacgggtcttgctctggcatccagcacttctccgcgatgctccgagatgaggtaggtggtcgcgcggttaacttgcttcctagtgaaaccgttcaggacatctacgggattgttgctaagaaagtcaacgagattctacaagcagacgcaatcaatgggaccgataacgaagtagttaccgtgaccgatgagaacactggtgaaatctctgagaaagtcaagctgggcactaaggcactggctggtcaatggctggcttacggtgttactcgcagtgtgactaagcgttcagtcatgacgctggcttacgggtccaaagagttcggcttccgtcaacaagtgctgcgccacactattcagtgggctattgattccggcaagggtctgatgttcactcagccgaatcaggctgctggatacatggctaagctgatttgggaatctgtgagcgtgacggtggtagctgcggttgaagcaatgaactggcttaagtctgctgctaagctgctggctgctgaggtcaaagataagaagactggagagattcttcgcaagcgttgcgctgtgcattgggtaactcctgatggtttccctgtgtggcaggaatacaagaagcctattcagacgcgcttgaacctgatgttcctcggtcagttccgcttacagcctaccattaacaccaacaaagatagcgagattgatgcacataaacaggagtctggtatcgctcctaactttgtacacagccaagacggtagccaccttcgtaagactgtagtgtgggcacacgagaagtacggaatcgaatcttttgcactgattcacgactccttcggtaccattccggctgacgctgcgaacctgttcaaagcagtgcgcgaaactatggttgacacatatgagtcttgtgatgtactggctgatttctacgaccagttcgctgaccagttgcacgagtctcaattggacaaaatgccagcacttccggctaaaggtaacttgaacctccgtgacatcttagagtcggacttcgcgttcgcg

SEQ ID NO: 582 - protein, 890 aa, synthetic construct
  REGION 1..890: note = Variant of RNA polymerase
MHHHHHHMNTINIAKNDFSDIELAAIPFNTLADHYGEGLAREQLALEHESYEMGEARFRKMTERQLKAGEVADNAAAKPLITTLLPKMIARINDWFEEVKAKRGKRPTAFQFLQEIKPEAVAYITIKTTLACLTSADRTTVQAVASAIGRAIEDEARFGRIRDLEAKHFKKNYEEQLNKRVGHVYKKAFMQVVEADMLSKGLLGGEAWSSWHKEDSIHVGVRCIEMLIESTGMVSLHRQNAGVVGQDSETIELAPEYAEAIATRAGALAGISPMFQPCVVPPKPWTGITGGGYWANGRRPLALVRTHSKKGLMRYEDVYMPEVYKAINIAQNTAWSINKWVLAVANVITKWKHCPVRDIPAIEREELPMKPEDIDMNPEALTAWKRAKAAVYRRDKARKSRRILLEFMLEQANKFANHKAIWFPYNMDWRGRVYAVSMFNPQGNDMTKGLLTLAKGKPIGKEGYYWLKIHGANCAGVDKVPFPERIKFIEENHENIMACAKSPLENTWWAEQDSPFCFLAFCFEYAGVQHHGLSYNCSLPLAFDGSCSGIQHFSAMLRDEVGGRAVNLLPSETVQDIYGIVAKKVNEILQADAINGTDNEVVTVTDENTGEISEKVKLGTKALAGQWLAYGVTRSVTKRSVMTLAYGSKEFGFRQQVLRHTIQWAIDSGKGLMFTQPNQAAGYMAKLIWESVSVTVVAAVEAMNWLKSAAKLLAAEVKDKKTGEILRKRCAVHWVTPDGFPVWQEYKKPIQTRLNLMFLGQFRLQPTINTNKDSEIDAHKQESGIAPNFVHSQDGSHLRKTVVWAHEKYGIESFALIHDSFGTIPADAANLFKAVRETMVDTYESCDVLADFYDQFADQLHESQLDKMPALPAKGNLNLRDILESDFAFA

SEQ ID NO: 583 - DNA, 2670 bp, synthetic construct
  misc_feature 1..2670: note = Variant of RNA polymerase
  source 1..2670: mol_type = other DNA
atgcaccatcaccatcaccatatgaacacgattaacatcgctaagaacgacttctctgacatcgaactggctgctatcccgttcaacactctggctgaccattacggtgagggcttagctcgcgaacagttggcccttgagcatgagtcttacgagatgggtgaagcacgtttccgcaagatgtttgagcgtcaacttaaagctggtgaggttgcggataacgctgccgccaagcctctcatcactaccctactccctaagatgattgcacgcatcaacgactggtttgaggaagtgaaagctaagcgcggcaagcgcccgacagccttccagttcctgcaagaaatcaagccggaagccgtagcgtacatcaccattaagaccactctggcttgcctaaccagtgcggaccgtacaagggttcaggctgtagcaagcgcaatcggtcgggccattgaggacgaggctcgcttcggtcgtatccgtgaccttgaagctaagcacttcaagaaaaactatgaggaacaactcaacaagcgcgtagggcacgtctacaagaaagcatttatgcaagttgtcgaggctgacatgctctctaagggtctactcggtggcgaggcgtggtcttcgtggcataaggaagactctattcatgtaggagtacgctgcatcgagatgctcattgagtcaaccggaatggttagcttacaccgccaaaatgctggcgtagtaggtcaagactctgagactatcgaactcgcacctgaatacgctgaggctatcgcaacccgtgcaggtgcgctggctggcatctctccgatgttccaaccttgcgtagttcctcctaagccgtggactggcattactggtggtggctattgggctaacggtcgtcgtcctctggcgctggtgcgtactcacagtaagaaaggtctgatgcgctacgaagacgtttacatgcctgaggtgtacaaagcgattaacattgcgcaaaacaccgcctggtcgatcaacaagtgggtcctggcggtcgccaacgtaatcaccaagtggaagcattgtccggtccgggacatccctgcgattgagcgtgaagaactcccgatgaaaccggaagacatcgacatgaatcctgaggctctcaccgcgtggaaacgtgctaaagctgctgtgtaccgcagagacaaggctcgcaagtctcgtcgtatcctgcttgagttcatgcttgagcaagccaataagtttgctaaccataaggccatctggttcccttacaacatggactggcgcggtcgtgtttacgctgtgtcaatgttcaacccgcaaggtaacgatatgaccaaaggactgcttacgctggcgaaaggtaaaccaatcggtaaggaaggttactactggctgaaaatccacggtgcaaactgtgcgggtgtcgataaggttccgttccctgagcgcatcaagttcattgaggaaaaccacgagaacatcatggcttgcgctaagtctccactggagaacacttggtgggctgagcaagatagtccgttctgcttccttgcgttctgctttgagtacgctggggtacagcaccacggcctgagctataactgctcccttccgctggcgtttgacgggtcttgctctggcatccagcacttctccgcgatgctccgagatgaggtaggtggtcgcgcggttaacttgcttcctagtgaaaccgttcaggacatctacgggattgttgctaagaaagtcaacgagattctacaagcagacgcaatcaatgggaccgataacgaagtagttaccgtgaccgatgagaacactggtgaaatctctgagaaagtcaagctgggcactaaggcactggctggtcaatggctggcttacggtgttactcgcagtgtgactaagcgttcagtcatgacgctggcttacgggtccaaagagttcggcttccgtcaacaagtgctgcgccacactattcagtgggctattgattccggcaagggtctgatgttcactcagccgaatcaggctgctggatacatggctaagctgatttgggaatctgtgagcgtgacggtggtagctgcggttgaagcaatgaactggcttaagtctgctgctaagctgctggctgctgaggtcaaagataagaagactggagagattcttcgcaagcgttgcgctgtgcattgggtaactcctgatggtttccctgtgtggcaggaatacaagaagcctattcagacgcgcttgaacctgatgttcctcggtcagttccgcttacagcctaccattaacaccaacaaagatagcgagattgatgcacataaacaggagtctggtatcgctcctaactttgtacacagccaagacggtagccaccttcgtaagactgtagtgtgggcacacgagaagtacggaatcgaatcttttgcactgattcacgactccttcggtaccattccggctgacgctgcgaacctgttcaaagcagtgcgcgaaactatggttgacacatatgagtcttgtgatgtactggctgatttctacgaccagttcgctgaccagttgcacgagtctcaattggacaaaatgccagcacttccggctaaaggtaacttgaacctccgtgacatcttagagtcggacttcgcgttcgcg

SEQ ID NO: 584 - protein, 890 aa, synthetic construct
  REGION 1..890: note = Variant of RNA polymerase
MHHHHHHMNTINIAKNDFSDIELAAIPFNTLADHYGEGLAREQLALEHESYEMGEARFRKMFERQLKAGEVADNAAAKPLITTLLPKMIARINDWFEEVKAKRGKRPTAFQFLQEIKPEAVAYITIKTTLACLTSADRTRVQAVASAIGRAIEDEARFGRIRDLEAKHFKKNYEEQLNKRVGHVYKKAFMQVVEADMLSKGLLGGEAWSSWHKEDSIHVGVRCIEMLIESTGMVSLHRQNAGVVGQDSETIELAPEYAEAIATRAGALAGISPMFQPCVVPPKPWTGITGGGYWANGRRPLALVRTHSKKGLMRYEDVYMPEVYKAINIAQNTAWSINKWVLAVANVITKWKHCPVRDIPAIEREELPMKPEDIDMNPEALTAWKRAKAAVYRRDKARKSRRILLEFMLEQANKFANHKAIWFPYNMDWRGRVYAVSMFNPQGNDMTKGLLTLAKGKPIGKEGYYWLKIHGANCAGVDKVPFPERIKFIEENHENIMACAKSPLENTWWAEQDSPFCFLAFCFEYAGVQHHGLSYNCSLPLAFDGSCSGIQHFSAMLRDEVGGRAVNLLPSETVQDIYGIVAKKVNEILQADAINGTDNEVVTVTDENTGEISEKVKLGTKALAGQWLAYGVTRSVTKRSVMTLAYGSKEFGFRQQVLRHTIQWAIDSGKGLMFTQPNQAAGYMAKLIWESVSVTVVAAVEAMNWLKSAAKLLAAEVKDKKTGEILRKRCAVHWVTPDGFPVWQEYKKPIQTRLNLMFLGQFRLQPTINTNKDSEIDAHKQESGIAPNFVHSQDGSHLRKTVVWAHEKYGIESFALIHDSFGTIPADAANLFKAVRETMVDTYESCDVLADFYDQFADQLHESQLDKMPALPAKGNLNLRDILESDFAFA

SEQ ID NO: 585 - DNA, 2670 bp, synthetic construct
  misc_feature 1..2670: note = Variant of RNA polymerase
  source 1..2670: mol_type = other DNA
atgcaccatcaccatcaccatatgaacacgattaacatcgctaagaacgacttctctgacatcgaactggctgctatcccgttcaacactctggctgaccattacggtgagggtttagctcgcgaacagttggcccttgagcatgagtcttacgagatgggtgaagcacgtttccgcaagatgtttgagcgtcaacttaaagctggtgaggttgcggataacgctgccgccaagcctctcatcactaccctactccctaagatgattgcacgcatcaacgactggtttgaggaagtgaaagctaagcgcggcaaacgcccgacagccttccagttcctgcaagaaatcaagccggaagccgtagcgtacatcaccattaagaccactctggcttgcctaaccagtgcggaccgtacaaccgttcaggctgtagcaagcgcaatcggtcgggccattgaggacgaggctcgcttcggtcgtatccgtgaccttgaagctaagcacttcctgaaaaacgttgaggaacaactcaacaagcgcgtagggcacgtctacaagaaagcatttatgcaagttgtcgaggctgacatgctctctaagggtctactcggtggcgaggcgtggtcttcgtggcataaggaagactctattcatgtaggagtacgctgcatcgagatgctcattgagtcaaccggaatggttagcttacaccgccaaaatgctggcgtagtaggtcaagactctgagactatcgaactcgcacctgaatacgctgaggctatcgcaacccgtgcaggtgcgctggctggcatctctccgatgttccaaccttgcgtagttcctcctaagccgtggactggcattactggtggtggctattgggctaacggtcgtcgtcctctggcgctggtgcgtactcacagtaagaaaggtctgatgcgctacgaagacgtttacatgcctgaggtgtacaaagcgattaacattgcgcaaaacaccgcctggtcgatcaacaagtgggtcctggcggtcgccaacgtaatcaccaagtggaagcattgtccggtcgaggacatccctgcgattgagcgtgaagaactcccgatgaaaccggaagacatcgacatgaatcctgaggctctcaccgcgtggaaacgtgctaaagctgctgtgtaccgcaaggacaaggctcgcaagtctcgccgtatcttgcttgagttcatgcttgagcaagccaataagtttgctaaccataaggccatctggttcccttacaacatggactggcgcggtcgtgtttacgctgtgtcaatgttcaacccgcaaggtaacgatatgaccaaaggactgcttacgctggcgaaaggtaaaccaatcggtaaggaaggttactactggctgaaaatccacggtgcaaactgtgcgggtgtcgataaggttccgttccctgagcgcatcaagttcattgaggaaaaccacgagaacatcatggcttgcgctaagtctccactggagaacacttggtgggctgagcaagatagtccgttctgcttccttgcgttctgctttgagtacgctggggtacagcaccacggcctgagctataactgctcccttccgctggcgtttgacgggtcttgctctggcatccagcacttctccgcgatgctccgagatgaggtaggtggtcgcgcggttaacttgcttcctagtgaaaccgttcaggacatctacgggattgttgctaagaaagtcaacgagattctacaagcagacgcaatcaatgggaccgataacgaagtagttaccgtgaccgatgagaacgaaggtgaaatctctgagaaagtcaagctgggcactaaggcactggctggtcaatggctggcttacggtgttactcgcagtgtgactaagcgttcagtcatgacgctggcttacgggtccaaagagttcggcttccgtcaacaagtgctgcgccacactattcagccagctattgattccggcaagggtctgatgttcactcagccgaatcaggctgctggatacatggctaagctgatttgggaatctgtgagcgtgacggtggtagctgcggttgaagcaatgaactggcttaagtctgctgctaagctgctggctgctgaggtcaaagataagaagactggagagattcttcgcaagcgttgcgctgtgcattgggtaactcctgatggtttccctgtgtggcaggaatacaagaagcctattcagacgcgcttgaacctgatgttcctcggtcagttccgcttacagcctaccattaacaccaacaaagatagcgagattgatgcacgtaaacaggagtctggtatcgctcctaactttgtacacagccaagacggtagccaccttcgtaagactgtagtgtgggcacacgagaagtacggaatcgaatcttttgcactgattcacgactccttcggtaccattccggctgacgctgcgaacctgttcaaagcagtgcgcgaaactatggttgacacatatgagtcttgtgatgtactggctgatttctacgaccagttcgctgaccagttgcacgagtctcaattggacaaaatgccagcacttccggctaaaggtaacttgaacctccgtgacatcttagagtcggacttcgcgttcgcg

SEQ ID NO: 586 - protein, 890 aa, synthetic construct
  REGION 1..890: note = Variant of RNA polymerase
MHHHHHHMNTINIAKNDFSDIELAAIPFNTLADHYGEGLAREQLALEHESYEMGEARFRKMFERQLKAGEVADNAAAKPLITTLLPKMIARINDWFEEVKAKRGKRPTAFQFLQEIKPEAVAYITIKTTLACLTSADRTTVQAVASAIGRAIEDEARFGRIRDLEAKHFLKNVEEQLNKRVGHVYKKAFMQVVEADMLSKGLLGGEAWSSWHKEDSIHVGVRCIEMLIESTGMVSLHRQNAGVVGQDSETIELAPEYAEAIATRAGALAGISPMFQPCVVPPKPWTGITGGGYWANGRRPLALVRTHSKKGLMRYEDVYMPEVYKAINIAQNTAWSINKWVLAVANVITKWKHCPVEDIPAIEREELPMKPEDIDMNPEALTAWKRAKAAVYRKDKARKSRRILLEFMLEQANKFANHKAIWFPYNMDWRGRVYAVSMFNPQGNDMTKGLLTLAKGKPIGKEGYYWLKIHGANCAGVDKVPFPERIKFIEENHENIMACAKSPLENTWWAEQDSPFCFLAFCFEYAGVQHHGLSYNCSLPLAFDGSCSGIQHFSAMLRDEVGGRAVNLLPSETVQDIYGIVAKKVNEILQADAINGTDNEVVTVTDENEGEISEKVKLGTKALAGQWLAYGVTRSVTKRSVMTLAYGSKEFGFRQQVLRHTIQPAIDSGKGLMFTQPNQAAGYMAKLIWESVSVTVVAAVEAMNWLKSAAKLLAAEVKDKKTGEILRKRCAVHWVTPDGFPVWQEYKKPIQTRLNLMFLGQFRLQPTINTNKDSEIDARKQESGIAPNFVHSQDGSHLRKTVVWAHEKYGIESFALIHDSFGTIPADAANLFKAVRETMVDTYESCDVLADFYDQFADQLHESQLDKMPALPAKGNLNLRDILESDFAFA

SEQ ID NO: 587 - DNA, 2670 bp, synthetic construct
  misc_feature 1..2670: note = Variant of RNA polymerase
  source 1..2670: mol_type = other DNA
atgcaccatcaccatcaccatatgaacacgattaacatcgctaagaacgacttctctgacatcgaactggctgctatcccgttcaacactctggctgaccattacggtgagggtttagctcgcgaacagttggcccttgagcatgagtcttacgagatgggtgaagcacgtttccgcaagatgtttgagcgtcaacttaaagctggtgaggttgcggataacgctgccgccaagcctctcatcactaccctactccctaagatgattgcacgcatcaacgactggtttgaggaagtgaaagctaagcgcggcaagcgcccgacagccttccagttcctgcaagaaatcaagccggaagccgtagcgtacatcaccattaagaccactctggcttgcctaaccagtgcggaccgtacaaccgttcaggctgtagcaagcgcaatcggtcgggccattgaggacgaggctcgcttcggtcgtatccgtgaccttgaagctaagcacttcctgaaaaacgttgaggaacaactcaacaagcgcgtagggcacgtctacaagaaagcatttatgcaagttgtcgaggctgacatgctctctaagggtctactcggtggcgaggcgtggtcttcgtggcataaggaagactctattcatgtaggagtacgctgcatcgagatgctcattgagtcaaccggaatggttagcttacaccgccaaaatgctggcgtagtaggtaaagactctgagactatcgaactcgcacctgaatacgctgaggctatcgcaacccgtgcaggtgcgctggctggcatctctccgatgttccaaccttgcgtagttcctcctaagccgtggactggcattactggtggtggctattgggctaacggtcgtcgtcctctggcgctggtgcgtactcacagtaagaaaggtctgatgcgctacgaagacgtttacatgcctgaggtgtacaaagcgattaacattgcgcaaaacaccgcctggtcgatcaacaagtgggtcctggcggtcgccaacgtaatcaccaagtggaagcattgtccggtcgaggacatccctgcgattgagcgtgaagaactcccgatgaaaccggaagacatcgacatgaatcctgaggctctcaccgcgtggaaacgtgctaaagctgctgtgtaccgcaaggacaaggctcgcaagtctcgccgtatcttgcttgagttcatgcttgagcaagccaataagtttgctaaccataaggccatctggttcccttacaacatggactggcgcggtcgtgtttacgctgtgtcaatgttcaacccgcaaggtaacgatatgaccaaaggactgcttacgctggcgaaaggtaaaccaatcggtaaggaaggttactactggctgaaaatccacggtgcaaactgtgcgggtgtcgataaggttccgttccctgagcgcatcaagttcattgaggaaaaccacgagaacatcatggcttgcgctaagtctccactggagaacacttggtgggctgagcaagatagtccgttctgcttccttgcgttctgctttgagtacgctggggtacagcaccacggcctgagctataactgctcccttccgctggcgtttgacgggtcttgctctggcatccagcacttctccgcgatgctccgagatgaggtaggtggtcgcgcggttaacttgcttcctagtgaaaccgttcaggacatctacgggattgttgctaagaaagtcaacgagattctacaagcagacgcaatcaatgggaccgataacgaagtagttaccgtgaccgatgagaacgaaggtgaaatctctgagaaagtcaagctgggcactaaggcactggctggtcaatggctggcttacggtgttactcgcagtgtgactaagcgttcagtcatgacgctggcttacgggtccaaagagttcggcttccgtcaacaagtgctgcgccacactattcagccagctattgattccggcaagggtctgatgttcactcagccgaatcaggctgctggatacatggctaagctgatttgggaatctgtgagcgtgacggtggtagctgcggttgaagcaatgaactggcttaagtctgctgctaagctgctggctgctgaggtcaaagataagaagactggagagattcttcgcaagcgttgcgctgtgcattgggtaactcctgatggtttccctgtgtggcaggaatacaagaagcctattcagacgcgcttgaacctgatgttcctcggtcagttccgcttacagcctaccattaacaccaacaaagatagcgagattgatgcacataaacaggagtctggtatcgctcctaactttgtacacagccaagacggtagccaccttcgtaagactgtagtgtgggcacacgagaagtacggaatcgaatcttttgcactgattcacgactccttcggtaccattccggctgacgctgcgaacctgttcaaagcagtgcgcgaaactatggttgacacatatgagtcttgtgatgtactggctgatttctacgaccagttcgctgaccagttgcacgagtctcaattggacaaaatgccagcacttccggctaaaggtaacttgaacctccgtgacatcttagagtcggacttcgcgttcgcg

SEQ ID NO: 588 - protein, 890 aa, synthetic construct
  REGION 1..890: note = Variant of RNA polymerase
MHHHHHHMNTINIAKNDFSDIELAAIPFNTLADHYGEGLAREQLALEHESYEMGEARFRKMFERQLKAGEVADNAAAKPLITTLLPKMIARINDWFEEVKAKRGKRPTAFQFLQEIKPEAVAYITIKTTLACLTSADRTTVQAVASAIGRAIEDEARFGRIRDLEAKHFLKNVEEQLNKRVGHVYKKAFMQVVEADMLSKGLLGGEAWSSWHKEDSIHVGVRCIEMLIESTGMVSLHRQNAGVVGKDSETIELAPEYAEAIATRAGALAGISPMFQPCVVPPKPWTGITGGGYWANGRRPLALVRTHSKKGLMRYEDVYMPEVYKAINIAQNTAWSINKWVLAVANVITKWKHCPVEDIPAIEREELPMKPEDIDMNPEALTAWKRAKAAVYRKDKARKSRRILLEFMLEQANKFANHKAIWFPYNMDWRGRVYAVSMFNPQGNDMTKGLLTLAKGKPIGKEGYYWLKIHGANCAGVDKVPFPERIKFIEENHENIMACAKSPLENTWWAEQDSPFCFLAFCFEYAGVQHHGLSYNCSLPLAFDGSCSGIQHFSAMLRDEVGGRAVNLLPSETVQDIYGIVAKKVNEILQADAINGTDNEVVTVTDENEGEISEKVKLGTKALAGQWLAYGVTRSVTKRSVMTLAYGSKEFGFRQQVLRHTIQPAIDSGKGLMFTQPNQAAGYMAKLIWESVSVTVVAAVEAMNWLKSAAKLLAAEVKDKKTGEILRKRCAVHWVTPDGFPVWQEYKKPIQTRLNLMFLGQFRLQPTINTNKDSEIDAHKQESGIAPNFVHSQDGSHLRKTVVWAHEKYGIESFALIHDSFGTIPADAANLFKAVRETMVDTYESCDVLADFYDQFADQLHESQLDKMPALPAKGNLNLRDILESDFAFA

SEQ ID NO: 589 - DNA, 2670 bp, synthetic construct
  misc_feature 1..2670: note = Variant of RNA polymerase
  source 1..2670: mol_type = other DNA
atgcaccatcaccatcaccatatgaacacgattaacatcgctaagaacgacttctctgacatcgaactggctgctatcccgttcaacactctggctgaccattacggtgagggtttagctcgcgaacagttggcccttgagcatgagtcttacgagatgggtgaagcacgtttccgcaagatgtttgagcgtcaacttaaagctggtgaggttgcggataacgctgccgccaagcctctcatcactaccctactccctaagatgattgcacgcatcaacgactggtttgaggaagtgaaagctaagcgcggcaagcgcccgacagccttccagttcctgcaagaaatcaagccggaagccgtagcgtacatcaccattaagaccactctggcttgcctaaccagtgcggaccgtacaaccgttcaggctgtagcaagcgcaatcggtcgggccattgaggacgaggctcgcttcggtcgtatccgtgaccttgaagctaagcacttcctgaaaaacgttgaggaacaactcaacaagcgcgtagggcacgtctacaagaaagcatttatgcaagttgtcgaggctgacatgctctctaagggtctactcggtggcgaggcgtggtcttcgtggcataaggaagattctattcatgtaggagtacgctgcatcgagatgctcattgagtcaaccggaatggttagcttacaccgccaaaatgctggcgtagtaggtaaagactctgagactatcgaactcgcacctgaatacgctgaggctatcgcaacccgtgcaggtgcgctggctggcatctctccgatgttccaaccttgcgtagttcctcctaagccgtggactggcattactggtggtggctattgggctaacggtcgtcgtcctctggcgctggtgcgtactcacagtaagaaaggtctgatgcgctacgaagacgtttacatgcctgaggtgtacaaagcgattaacattgcgcaaaacaccgcctggtcgatcaacaagtgggtcctggcggtcgccaacgtaatcaccaagtggaagcattgtccggtcgaggacatccctgcgattgagcgtgaagaactcccgatgaaaccggaagacatcgacatgaatcctgaggctctcaccgcgtggaaacgtgctaaagctgctgtgtaccgcaaggacaaggctcgcaagtctcgccgtatcttgcttgagttcatgcttgagcaagccaataagtttgctaaccataaggccatctggttcccttacaacatggactggcgcggtcgtgtttacgctgtgtcaatgttcaacccgcaaggtaacgatatgaccaaaggactgcttacgctggcgaaaggtaaaccaatcggtaaggaaggttactactggctgaaaatccacggtgcaaactgtgcgggtgtcgataaggttccgttccctgagcgcatcaagttcattgaggaaaaccacgagaacatcatggcttgcgctaagtctccactggagaacacttggtgggctgagcaagatagtccgttctgcttccttgcgttctgctttgagtacgctggggtacagcaccacggcctgagctataactgctcccttccgctggcgtttgacgggtcttgctctggcatccagcacttctccgcgatgctccgagatgaggtaggtggtcgcgcggttaacttgcttcctagtgaaaccgttcaggacatctacgggattgttgctaagaaagtcaacgagattctacaagcagacgcaatcaatgggaccgataacgaagtagttaccgtgaccgatgagaacactggtgaaatctctgagaaagtcaagctgggcactaaggcactggctggtcaatggctggcttacggtgttactcgcagtgtgactaagcgttcagtcatgacgctggcttacgggtccaaagagttcggcttccgtcaacaagtgctgcgccacactattcagccagctattgattccggcaagggtctgatgttcactcagccgaatcaggctgctggatacatggctaagctgatttgggaatctgtgagcgtgacggtggtagctgcggttgaagcaatgaactggcttaagtctgctgctaagctgctggctgctgaggtcaaagataagaagactggagagattcttcgcaagcgttgcgctgtgcattgggtaactcctgatggtttccctgtgtggcaggaatacaagaagcctattcagacgcgcttgaacctgatgttcctcggtcagttccgcttacagcctaccattaacaccaacaaagatagcgagattgatgcacataaacaggagtctggtatcgctcctaactttgtacacagccaagacggtagccaccttcgtaagactgtagtgtgggcacacgagaagtacggaatcgaatcttttgcactgattcacgactccttcggtaccattccggctgacgctgcgaacctgttcaaagcagtgcgcgaaactatggttgacacatatgagtcttgtgatgtactggctgatttctacgaccagttcgctgaccagttgcacgagtctcaattggacaaaatgccagcacttccggctaaaggtaacttgaacctccgtgacatcttagagtcggacttcgcgttcgcg

SEQ ID NO: 590 - protein, 890 aa, synthetic construct
  REGION 1..890: note = Variant of RNA polymerase
MHHHHHHMNTINIAKNDFSDIELAAIPFNTLADHYGEGLAREQLALEHESYEMGEARFRKMFERQLKAGEVADNAAAKPLITTLLPKMIARINDWFEEVKAKRGKRPTAFQFLQEIKPEAVAYITIKTTLACLTSADRTTVQAVASAIGRAIEDEARFGRIRDLEAKHFLKNVEEQLNKRVGHVYKKAFMQVVEADMLSKGLLGGEAWSSWHKEDSIHVGVRCIEMLIESTGMVSLHRQNAGVVGKDSETIELAPEYAEAIATRAGALAGISPMFQPCVVPPKPWTGITGGGYWANGRRPLALVRTHSKKGLMRYEDVYMPEVYKAINIAQNTAWSINKWVLAVANVITKWKHCPVEDIPAIEREELPMKPEDIDMNPEALTAWKRAKAAVYRKDKARKSRRILLEFMLEQANKFANHKAIWFPYNMDWRGRVYAVSMFNPQGNDMTKGLLTLAKGKPIGKEGYYWLKIHGANCAGVDKVPFPERIKFIEENHENIMACAKSPLENTWWAEQDSPFCFLAFCFEYAGVQHHGLSYNCSLPLAFDGSCSGIQHFSAMLRDEVGGRAVNLLPSETVQDIYGIVAKKVNEILQADAINGTDNEVVTVTDENTGEISEKVKLGTKALAGQWLAYGVTRSVTKRSVMTLAYGSKEFGFRQQVLRHTIQPAIDSGKGLMFTQPNQAAGYMAKLIWESVSVTVVAAVEAMNWLKSAAKLLAAEVKDKKTGEILRKRCAVHWVTPDGFPVWQEYKKPIQTRLNLMFLGQFRLQPTINTNKDSEIDAHKQESGIAPNFVHSQDGSHLRKTVVWAHEKYGIESFALIHDSFGTIPADAANLFKAVRETMVDTYESCDVLADFYDQFADQLHESQLDKMPALPAKGNLNLRDILESDFAFA

SEQ ID NO: 591 - DNA, 2670 bp, synthetic construct
  misc_feature 1..2670: note = Variant of RNA polymerase
  source 1..2670: mol_type = other DNA
atgcaccatcaccatcaccatatgaacacgattaacatcgctaagaacgacttctctgacatcgaactggctgctatcccgttcaacactctggctgaccattacggtgagggtttagctcgcgaacagttggcccttgagcatgagtcttacgagatgggtgaagcacgtttccgcaagatgtttgagcgtcaacttaaagctggtgaggttgcggataacgctgccgccaagcctctcatcactaccctactccctaagatgattgcacgcatcaacgactggtttgaggaagtgaaagctaagcgcggcaagcgcccgacagccttccagttcctgcaagaaatcaagccggaagccgtagcgtacatcaccattaagaccactctggcttgcctaaccagtgcggaccgtacaaccgttcaggctgtagcaagcgcaatcggtcgggccattgaggacgaggctcgcttcggtcgtatccgtgaccttgaagctaagcacttcctgaaaaacgttgaggaacaactcaacaagcgcgtagggcacgtctacaagaaagcatttatgcaagttgtcgaggctgacatgctctctaagggtctactcggtggcgaggcgtggtcttcgtggcataaggaagactctattcatgtaggagtacgctgcatcgagatgctcattgagtcaaccggaatggttagcttacaccgccaaaatgctggcgtagtaggtcaagactctgagactatcgaactcgcacctgaatacgctgaggctatcgcaacccgtgcaggtgcgctggctggcatctctccgatgttccaaccttgcgtagttcctcctaagccgtggactggcattactggtggtggctattgggctaacggtcgtcgtcctctggcgctggtgcgtactcacagtaagaaaggtctgatgcgctacgaagacgtttacatgcctgaggtgtacaaagcgattaacattgcgcaaaacaccgcctggtcgatcaacaagtgggtcctggcggtcgccaacgtaatcaccaagtggaagcattgtccggtcgaggacatccctgcgattgagcgtgaagaactcccgatgaaaccggaagacatcgacatgaatcctgaggctctcaccgcgtggaaacgtgctaaagctgctgtgtaccgcaaggacaaggctcgcaagtctcgccgtatcttgcttgagttcatgcttgagcaagccaataagtttgctaaccataaggccatctggttcccttacaacatggactggcgcggtcgtgtttacgctgtgtcaatgttcaacccgcaaggtaacgatatgaccaaaggactgcttacgctggcgaaaggtaaaccaatcggtaaggaaggttactactggctgaaaatccacggtgcaaactgtgcgggtgtcgataaggttccgttccctgagcgcatcaagttcattgaggaaaaccacgagaacatcatggcttgcgctaagtctccactggagaacacttggtgggctgagcaagatagtccgttctgcttccttgcgttctgctttgagtacgctggggtacagcaccacggcctgagctataactgctcccttccgctggcgtttgacgggtcttgctctggcatccagcacttctccgcgatgctccgagatgaggtaggtggtcgcgcggttaacttgcttcctagtgaaaccgttcaggacatctacgggattgttgctaagaaagtcaacgagattctacaagcagacgcaatcaatgggaccgataacgaagtagttaccgtgaccgatgagaacgaaggtgaaatctctgagaaagtcaagctgggcactaaggcactggctggtcaatggctggcttacggtgttactcgcagtgtgactaagcgttcagtcatgacgctggcttacgggtccaaagagttcggcttccgtcaacaagtgctgcgccacactattcagccagctattgattccggcaagggtctgatgttcactcagccgaatcaggctgctggatacatggctaagctgatttgggaatctgtgagcgtgacggtggtagctgcggttgaagcaatgaactggcttaagtctgctgctaagctgctggctgctgaggtcaaagataagaagactggagagattcttcgcaagcgttgcgctgtgcattgggtaactcctgatggtttccctgtgtggcaggaatacaagaagcctattcagacgcgcttgaacctgatgttcctcggtcagttccgcttacagcctaccattaacaccaacaaagatagcaagattgatgcacgtaaacaggagtctggtatcgctcctaactttgtacacagccaagacggtagccaccttcgtaagactgtagtgtgggcacacgagaagtacggaatcgaatcttttgcactgattcacgactccttcggtaccattccggctgacgctgcgaacctgttcaaagcagtgcgcgaaactatggttgacacatatgagtcttgtgatgtactggctgatttctacgaccagttcgctgaccagttgcacgagtctcaattggacaaaatgccagcacttccggctaaaggtaacttgaacctccgtgacatcttagagtcggacttcgcgttcgcg

SEQ ID NO: 592 - protein, 890 aa, synthetic construct
  REGION 1..890: note = Variant of RNA polymerase
MHHHHHHMNTINIAKNDFSDIELAAIPFNTLADHYGEGLAREQLALEHESYEMGEARFRKMFERQLKAGEVADNAAAKPLITTLLPKMIARINDWFEEVKAKRGKRPTAFQFLQEIKPEAVAYITIKTTLACLTSADRTTVQAVASAIGRAIEDEARFGRIRDLEAKHFLKNVEEQLNKRVGHVYKKAFMQVVEADMLSKGLLGGEAWSSWHKEDSIHVGVRCIEMLIESTGMVSLHRQNAGVVGQDSETIELAPEYAEAIATRAGALAGISPMFQPCVVPPKPWTGITGGGYWANGRRPLALVRTHSKKGLMRYEDVYMPEVYKAINIAQNTAWSINKWVLAVANVITKWKHCPVEDIPAIEREELPMKPEDIDMNPEALTAWKRAKAAVYRKDKARKSRRILLEFMLEQANKFANHKAIWFPYNMDWRGRVYAVSMFNPQGNDMTKGLLTLAKGKPIGKEGYYWLKIHGANCAGVDKVPFPERIKFIEENHENIMACAKSPLENTWWAEQDSPFCFLAFCFEYAGVQHHGLSYNCSLPLAFDGSCSGIQHFSAMLRDEVGGRAVNLLPSETVQDIYGIVAKKVNEILQADAINGTDNEVVTVTDENEGEISEKVKLGTKALAGQWLAYGVTRSVTKRSVMTLAYGSKEFGFRQQVLRHTIQPAIDSGKGLMFTQPNQAAGYMAKLIWESVSVTVVAAVEAMNWLKSAAKLLAAEVKDKKTGEILRKRCAVHWVTPDGFPVWQEYKKPIQTRLNLMFLGQFRLQPTINTNKDSKIDARKQESGIAPNFVHSQDGSHLRKTVVWAHEKYGIESFALIHDSFGTIPADAANLFKAVRETMVDTYESCDVLADFYDQFADQLHESQLDKMPALPAKGNLNLRDILESDFAFA

SEQ ID NO: 593 - DNA, 2670 bp, synthetic construct
  misc_feature 1..2670: note = Variant of RNA polymerase
  source 1..2670: mol_type = other DNA
atgcaccatcaccatcaccatatgaacacgattaacatcgctaagaacgacttctctgacatcgaactggctgctatcccgttcaacactctggctgaccattacggtgagggtttagctcgcgaacagttggcccttgagcatgagtcttacgagatgggtgaagcacgtttccgcaagatgtttgagcgtcaacttaaagctggtgaggttgcggataacgctgccgccaagcctctcatcactaccctactccctaagatgattgcacgcatcaacgactggtttgaggaagtgaaagctaagcgcggccgccgcccgacagccttccagttcctgcaagaaatcaagccggaagccgtagcgtacatcaccattaagaccactctggcttgcctaaccagcgcggaccgtacaaccgttcaggctgtagcaagcgcaatcggtcgggccattgaggacgaggctcgcttcggtcgtatccgtgaccttgaagctaagcacttcctgaaaaacgttgaggaacaactcaacaagcgcgtagggcacgtctacaagaaagcatttatgcaagttgtcgaggctgacatgctctctaagggtctactcggtggcgaggcgtggtcttcgtggcataaggaagactctattcatgtaggagtacgctgcatcgagatgctcattgagtcaaccggaatggttagcttacaccgccaaaatgctggcgtagtaggtcaagactctgagactatcgaactcgcacctgaatacgctgaggctatcgcaacccgtgcaggtgcgctggctggcatctctccgatgttccaaccttgcgtagttcctcctaagccgtggactggcattactggtggtggctattgggctaacggtcgtcgtcctctggcgctggtgcgtactcacagtaagaaaggtctgatgcgctacgaagacgtttacatgcctgaggtgtacaaagcgattaacattgcgcaaaacaccgcctggtcgatcaacaagtgggtcctggcggtcgccaacgtaatcaccaagtggaagcattgtccggtcgaggacatccctgcgattgagcgtgaagaactcccgatgaaaccggaagacatcgacatgaatcctgaggctctcaccgcgtggaaacgtgctaaagctgctgtgtaccgcaaggacaaggctcgcaagtctcgccgtatcttgcttgagttcatgcttgagcaagccaataagtttgctaaccataaggccatctggttcccttacaacatggactggcgcggtcgtgtttacgctgtgtcaatgttcaacccgcaaggtaacgatatgaccaaaggactgcttacgctggcgaaaggtaaaccaatcggtaaggaaggttactactggctgaaaatccacggtgcaaactgtgcgggtgtcgataaggttccgttccctgagcgcatcaagttcattgaggaaaaccacgagaacatcatggcttgcgctaagtctccactggagaacacttggtgggctgagcaagatagtccgttctgcttccttgcgttctgctttgagtacgctggggtacagcaccacggcctgagctataactgctcccttccgctggcgtttgacgggtcttgctctggcatccagcacttctccgcgatgctccgagatgaggtaggtggtcgcgcggttaacttgcttcctagtgaaaccgttcaggacatctacgggattgttgctaagaaagtcaacgagattctacaagcagacgcaatcaatgggaccgataacgaagtagttaccgtgaccgatgagaacactggtgaaatctctgagaaagtcaagctgggcactaaggcactggctggtcaatggctggcttacggtgttactcgcagtgtgactaagcgttcagtcatgacgctggcttacgggtccaaagagttcggcttccgtcaacaagtgctgcgccacactattcagccagctattgattccggcaagggtctgatgttcactcagccgaatcaggctgctggatacatggctaagctgatttgggaatctgtgagcgtgacggtggtagctgcggttgaagcaatgaactggcttaagtctgctgctaagctgctggctgctgaggtcaaagataagaagactggagagattcttcgcaagcgttgcgctgtgcattgggtaactcctgatggtttccctgtgtggcaggaatacaagaagcctattcagacgcgcttgaacctgatgttcctcggtcagttccgcttacagcctaccattaacaccaacaaagatagcgagattgatgcacacaaacaggagtctggtatcgctcctaactttgtacacagccaagacggtagccaccttcgtaagactgtagtgtgggcacacgagaagtacggaatcgaatcttttgcactgattcacgactccttcggtaccattccggctgacgctgcgaacctgttcaaagcagtgcgcgaaactatggttgacacatatgagtcttgtgatgtactggctgatttctacgaccagttcgctgaccagttgcacgagtctcaattggacaaaatgccagcacttccggctaaaggtaacttgaacctccgtgacatcttagagtcggacttcgcgttcgcg

SEQ ID NO: 594 - protein, 890 aa, synthetic construct
  REGION 1..890: note = Variant of RNA polymerase
MHHHHHHMNTINIAKNDFSDIELAAIPFNTLADHYGEGLAREQLALEHESYEMGEARFRKMFERQLKAGEVADNAAAKPLITTLLPKMIARINDWFEEVKAKRGRRPTAFQFLQEIKPEAVAYITIKTTLACLTSADRTTVQAVASAIGRAIEDEARFGRIRDLEAKHFLKNVEEQLNKRVGHVYKKAFMQVVEADMLSKGLLGGEAWSSWHKEDSIHVGVRCIEMLIESTGMVSLHRQNAGVVGQDSETIELAPEYAEAIATRAGALAGISPMFQPCVVPPKPWTGITGGGYWANGRRPLALVRTHSKKGLMRYEDVYMPEVYKAINIAQNTAWSINKWVLAVANVITKWKHCPVEDIPAIEREELPMKPEDIDMNPEALTAWKRAKAAVYRKDKARKSRRILLEFMLEQANKFANHKAIWFPYNMDWRGRVYAVSMFNPQGNDMTKGLLTLAKGKPIGKEGYYWLKIHGANCAGVDKVPFPERIKFIEENHENIMACAKSPLENTWWAEQDSPFCFLAFCFEYAGVQHHGLSYNCSLPLAFDGSCSGIQHFSAMLRDEVGGRAVNLLPSETVQDIYGIVAKKVNEILQADAINGTDNEVVTVTDENTGEISEKVKLGTKALAGQWLAYGVTRSVTKRSVMTLAYGSKEFGFRQQVLRHTIQPAIDSGKGLMFTQPNQAAGYMAKLIWESVSVTVVAAVEAMNWLKSAAKLLAAEVKDKKTGEILRKRCAVHWVTPDGFPVWQEYKKPIQTRLNLMFLGQFRLQPTINTNKDSEIDAHKQESGIAPNFVHSQDGSHLRKTVVWAHEKYGIESFALIHDSFGTIPADAANLFKAVRETMVDTYESCDVLADFYDQFADQLHESQLDKMPALPAKGNLNLRDILESDFAFA

SEQ ID NO: 595 - DNA, 2670 bp, synthetic construct
  misc_feature 1..2670: note = Variant of RNA polymerase
  source 1..2670: mol_type = other DNA
atgcaccatcaccatcaccatatgaacacgattaacatcgctaagaacgacttctctgacatcgaactggctgctatcccgttcaacactctggctgaccattacggtgagggtttagctcgcgaacagttggcccttgagcatgagtcttacgagatgggtgaagcacgtttccgcaagatgtttgagcgtcaacttaaagctggtgaggttgcggataacgctgccgccaagcctctcatcactaccctactccctaagatgattgcacgcatcaacgactggtttgaggaagtgaaagctaagcgcggcaaacgcccgacagccttccagttcctgcaagaaatcaagccggaagccgtagcgtacatcaccattaagaccactctggcttgcctaaccagcgcggaccgtacaaccgttcagaatgtagcaagcgcaatcggtcgggccattgaggacgaggctcgcttcggtcgtatccgtgaccttgaagctaagcacttcctgaaaaacgttgaggaacaactcaacaagcgcgtagggcacgtctacaagaaagcatttatgcaagttgtcgaggctgacatgctctctaagggtctactcggtggcgaggcgtggtcttcgtggcataaggaagactctattcatgtaggagtacgctgcatcgagatgctcattgagtcaaccggaatggttagcttacaccgccaaaatgctggcgtagtaggtcaagactctgagactatcgaactcgcacctgaatacgctgaggctatcgcaacccgtgcaggtgcgctggctggcatctctccgatgttccaaccttgcgtagttcctcctaagccgtggactggcattactggtggtggctattgggctaacggtcgtcgtcctctggcgctggtgcgtactcacagtaagaaaggtctgatgcgctacgaagacgtttacatgcctgaggtgtacaaagcgattaacattgcgcaaaacaccgcctggtcgatcaacaagtgggtcctggcggtcgccaacgtaatcaccaagtggaagcattgtccggtcgaggacatccctgcgattgagcgtgaagaactcccgatgaaaccggaagacatcgacatgaatcctgaggctctcaccgcgtggaaacgtgctaaagctgctgtgtaccgcaaggacaaggctcgcaagtctcgccgtatcttgcttgagttcatgcttgagcaagccaataagtttgctaaccataaggccatctggttcccttacaacatggactggcgcggtcgtgtttacgctgtgtcaatgttcaacccgcaaggtaacgatatgaccaaaggactgcttacgctggcgaaaggtaaaccaatcggtaaggaaggttactactggctgaaaatccacggtgcaaactgtgcgggtgtcgataaggttccgttccctgagcgcatcaagttcattgaggaaaaccacgagaacatcatggcttgcgctaagtctccactggagaacacttggtgggctgagcaagatagtccgttctgcttccttgcgttctgctttgagtacgctggggtacagcaccacggcctgagctataactgctcccttccgctggcgtttgacgggtcttgctctggcatccagcacttctccgcgatgctccgagatgaggtaggtggtcgcgcggttaacttgcttcctagtgaaaccgttcaggacatctacgggattgttgctaagaaagtcaacgagattctacaagcagacgcaatcaatgggaccgataacgaagtagttaccgtgaccgatgagaacgaaggtgaaatctctgagaaagtcaagctgggcactaaggcactggctggtcaatggctggcttacggtgttactcgcagtgtgactaagcgttcagtcatgacgctggcttacgggtccaaagagttcggcttccgtcaacaagtgctgcgccacactattcagccagctattgattccggcaagggtctgatgttcactcagccgaatcaggctgctggatacatggctaagctgatttgggaatctgtgagcgtgacggtggtagctgcggttgaagcaatgaactggcttaagtctgctgctaagctgctggctgctgaggtcaaagataagaagactggagagattcttcgcaagcgttgcgctgtgcattgggtaactcctgatggtttccctgtgtggcaggaatacaagaagcctattcagacgcgcttgaacctgatgttcctcggtcagttccgcttacagcctaccattaacaccaacaaagatagcaagattgatgcacataaacaggagtctggtatcgctcctaactttgtacacagccaagacggtagccaccttcgtaagactgtagtgtgggcacacgagaagtacggaatcgaatcttttgcactgattcacgactccttcggtaccattccggctgacgctgcgaacctgttcaaagcagtgcgcgaaactatggttgacacatatgagtcttgtgatgtactggctgatttctacgaccagttcgctgaccagttgcacgagtctcaattggacaaaatgccagcacttccggctaaaggtaacttgaacctccgtgacatcttagagtcggacttcgcgttcgcg

SEQ ID NO: 596 - protein, 890 aa, synthetic construct
  REGION 1..890: note = Variant of RNA polymerase
MHHHHHHMNTINIAKNDFSDIELAAIPFNTLADHYGEGLAREQLALEHESYEMGEARFRKMFERQLKAGEVADNAAAKPLITTLLPKMIARINDWFEEVKAKRGKRPTAFQFLQEIKPEAVAYITIKTTLACLTSADRTTVQNVASAIGRAIEDEARFGRIRDLEAKHFLKNVEEQLNKRVGHVYKKAFMQVVEADMLSKGLLGGEAWSSWHKEDSIHVGVRCIEMLIESTGMVSLHRQNAGVVGQDSETIELAPEYAEAIATRAGALAGISPMFQPCVVPPKPWTGITGGGYWANGRRPLALVRTHSKKGLMRYEDVYMPEVYKAINIAQNTAWSINKWVLAVANVITKWKHCPVEDIPAIEREELPMKPEDIDMNPEALTAWKRAKAAVYRKDKARKSRRILLEFMLEQANKFANHKAIWFPYNMDWRGRVYAVSMFNPQGNDMTKGLLTLAKGKPIGKEGYYWLKIHGANCAGVDKVPFPERIKFIEENHENIMACAKSPLENTWWAEQDSPFCFLAFCFEYAGVQHHGLSYNCSLPLAFDGSCSGIQHFSAMLRDEVGGRAVNLLPSETVQDIYGIVAKKVNEILQADAINGTDNEVVTVTDENEGEISEKVKLGTKALAGQWLAYGVTRSVTKRSVMTLAYGSKEFGFRQQVLRHTIQPAIDSGKGLMFTQPNQAAGYMAKLIWESVSVTVVAAVEAMNWLKSAAKLLAAEVKDKKTGEILRKRCAVHWVTPDGFPVWQEYKKPIQTRLNLMFLGQFRLQPTINTNKDSKIDAHKQESGIAPNFVHSQDGSHLRKTVVWAHEKYGIESFALIHDSFGTIPADAANLFKAVRETMVDTYESCDVLADFYDQFADQLHESQLDKMPALPAKGNLNLRDILESDFAFA

SEQ ID NO: 597 - DNA, 2670 bp, synthetic construct
  misc_feature 1..2670: note = Variant of RNA polymerase
  source 1..2670: mol_type = other DNA
atgcaccatcaccatcaccatatgaacacgattaacatcgctaagaacgacttctctgacatcgaactggctgctatcccgttcaacactctggctgaccattacggtgagggtttagctcgcgaacagttggcccttgagcatgagtcttacgagatgggtgaagcacgtttccgcaagatgtttgagcgtcaacttaaagctggtgaggttgcggataacgctgccgccaagcctctcatcactaccctactccctaagatgattgcacgcatcaacgactggtttgaggaagtgaaagctaagcgcggccgccgcccgacagccttccagttcctgcaagaaatcaagccggaagccgtagcgtacatcaccattaagaccactctggcttgcctaaccaaagcggaccgtacaaccgttcaggccgtagcaagcgcaatcggtcgggccattgaggacgaggctcgcttcggtcgtatccgtgaccttgaagctaagcacttcctgaaaaacgttgaggaacaactcaacaagcgcgtagggcacgtctacaagaaagcatttatgcaagttgtcgaggctgacatgctctctaagggtctactcggtggcgaggcgtggtcttcgtggcataaggaagactctattcatgtaggagtacgctgcatcgagatgctcattgagtcaaccggaatggttagcttacaccgccaaaatgctggcgtagtaggtcaagactctgagactatcgaactcgcacctgaatacgctgaggctatcgcaacccgtgcaggtgcgctggctggcatctctccgatgttccaaccttgcgtagttcctcctaagccgtggactggcattactggtggtggctattgggctaacggtcgtcgtcctctggcgctggtgcgtactcacagtaagaaaggtctgatgcgctacgaagacgtttacatgcctgaggtgtacaaagcgattaacattgcgcaaaacaccgcctggtcgatcaacaagtgggtcctggcggtcgccaacgtaatcaccaagtggaagcattgtccggtcgaggacatccctgcgattgagcgtgaagaactcccgatgaaaccggaagacatcgacatgaatcctgaggctctcaccgcgtggaaacgtgctaaagctgctgtgtaccgcaaggacaaggctcgcaagtctcgccgtatcttgcttgagttcatgcttgagcaagccaataagtttgctaaccataaggccatctggttcccttacaacatggactggcgcggtcgtgtttacgctgtgtcaatgttcaacccgcaaggtaacgatatgaccaaaggactgcttacgctggcgaaaggtaaaccaatcggtaaggaaggttactactggctgaaaatccacggtgcaaactgtgcgggtgtcgataaggttccgttccctgagcgcatcaagttcattgaggaaaaccacgagaacatcatggcttgcgctaagtctccactggagaacacttggtgggctgagcaagatagtccgttctgcttccttgcgttctgctttgagtacgctggggtacagcaccacggcctgagctataactgctcccttccgctggcgtttgacgggtcttgctctggcatccagcacttctccgcgatgctccgagatgaggtaggtggtcgcgcggttaacttgcttcctagtgaaaccgttcaggacatctacgggattgttgctaagaaagtcaacgagattctacaagcagacgcaatcaatgggaccgataacgaagtagttaccgtgaccgatgagaacgaaggtgaaatctctgagaaagtcaagctgggcactaaggcactggctggtcaatggctggcttacggtgttactcgcagtgtgactaagcgttcagtcatgacgctggcttacgggtccaaagagttcggcttccgtcaacaagtgctgcgccacactattcagccagctattgattccggcaagggtctgatgttcactcagccgaatcaggctgctggatacatggctaagctgatttgggaatctgtgagcgtgacggtggtagctgcggttgaagcaatgaactggcttaagtctgctgctaagctgctggctgctgaggtcaaagataagaagactggagagattcttcgcaagcgttgcgctgtgcattgggtaactcctgatggtttccctgtgtggcaggaatacaagaagcctattcagacgcgcttgaacctgatgttcctcggtcagttccgcttacagcctaccattaacaccaacaaagatagcaagattgatgcacataaacaggagtctggtatcgctcctaactttgtacacagccaagacggtagccaccttcgtaagactgtagtgtgggcacacgagaagtacggaatcgaatcttttgcactgattcacgactccttcggtaccattccggctgacgctgcgaacctgttcaaagcagtgcgcgaaactatggttgacacatatgagtcttgtgatgtactggctgatttctacgaccagttcgctgaccagttgcacgagtctcaattggacaaaatgccagcacttccggctaaaggtaacttgaacctccgtgacatcttagagtcggacttcgcgttcgcg

SEQ ID NO: 598 - protein, 890 aa, synthetic construct
  REGION 1..890: note = Variant of RNA polymerase
MHHHHHHMNTINIAKNDFSDIELAAIPFNTLADHYGEGLAREQLALEHESYEMGEARFRKMFERQLKAGEVADNAAAKPLITTLLPKMIARINDWFEEVKAKRGRRPTAFQFLQEIKPEAVAYITIKTTLACLTKADRTTVQAVASAIGRAIEDEARFGRIRDLEAKHFLKNVEEQLNKRVGHVYKKAFMQVVEADMLSKGLLGGEAWSSWHKEDSIHVGVRCIEMLIESTGMVSLHRQNAGVVGQDSETIELAPEYAEAIATRAGALAGISPMFQPCVVPPKPWTGITGGGYWANGRRPLALVRTHSKKGLMRYEDVYMPEVYKAINIAQNTAWSINKWVLAVANVITKWKHCPVEDIPAIEREELPMKPEDIDMNPEALTAWKRAKAAVYRKDKARKSRRILLEFMLEQANKFANHKAIWFPYNMDWRGRVYAVSMFNPQGNDMTKGLLTLAKGKPIGKEGYYWLKIHGANCAGVDKVPFPERIKFIEENHENIMACAKSPLENTWWAEQDSPFCFLAFCFEYAGVQHHGLSYNCSLPLAFDGSCSGIQHFSAMLRDEVGGRAVNLLPSETVQDIYGIVAKKVNEILQADAINGTDNEVVTVTDENEGEISEKVKLGTKALAGQWLAYGVTRSVTKRSVMTLAYGSKEFGFRQQVLRHTIQPAIDSGKGLMFTQPNQAAGYMAKLIWESVSVTVVAAVEAMNWLKSAAKLLAAEVKDKKTGEILRKRCAVHWVTPDGFPVWQEYKKPIQTRLNLMFLGQFRLQPTINTNKDSKIDAHKQESGIAPNFVHSQDGSHLRKTVVWAHEKYGIESFALIHDSFGTIPADAANLFKAVRETMVDTYESCDVLADFYDQFADQLHESQLDKMPALPAKGNLNLRDILESDFAFA

SEQ ID NO: 599 - DNA, 2670 bp, synthetic construct
  misc_feature 1..2670: note = Variant of RNA polymerase
  source 1..2670: mol_type = other DNA
atgcaccatcaccatcaccatatgaacacgattaacatcgctaagaacgacttctctgacatcgaactggctgctatcccgttcaacactctggctgaccattacggtgagggtttagctcgcgaacagttggcccttgagcatgagtcttacgagatgggtgaagcacgtttccgcaagatgtttgagcgtcaacttaaagctggtgaggttgcggataacgctgccgccaagcctctcatcactaccctactccctaagatgattgcacgcatcaacgactggtttgaggaagtgaaagctaagcgcggcaagcgcccgacagccttcaagttcctgcaagaaatcaagccggaagccgtagcgtacatcaccattaagaccactctggcttgcctaaccagtgcggaccgtacaaccgttcaggctgtagcaagcgcaatcggtcgggccattgaggacgaggctcgcttcggtcgtatccgtgaccttgaagctaagcacttcctgaaaaacgttgaggaacaactcaacaagcgcgtagggcacgtctacaagaaagcatttatgcaagttgtcgaggctgacatgctctctaagggtctactcggtggcgaggcgtggtcttcgtggcataaggaagactctattcatgtaggagtacgctgcatcgagatgctcattgagtcaaccggaatggttagcttacaccgccaaaatgctggcgtagtaggtcaagactctgagactatcgaactcgcacctgaatacgctgaggctatcgcaacccgtgcaggtgcgctggctggcatctctccgatgttccaaccttgcgtagttcctcctaagccgtggactggcattactggtggtggctattgggctaacggtcgtcgtcctctggcgctggtgcgtactcacagtaagaaaggtctgatgcgctacgaagacgtttacatgcctgaggtgtacaaagcgattaacattgcgcaaaacaccgcctggtcgatcaacaagtgggtcctggcggtcgccaacgtaatcaccaagtggaagcattgtccggtcgaggacatccctgcgattgagcgtgaagaactcccgatgaaaccggaagacatcgacatgaatcctgaggctctcaccgcgtggaaacgtgctaaagctgctgtgtaccgcaaggacaaggctcgcaagtctcgccgtatcttgcttgagttcatgcttgagcaagccaataagtttgctaaccataaggccatctggttcccttacaacatggactggcgcggtcgtgtttacgctgtgtcaatgttcaacccgcaaggtaacgatatgaccaaaggactgcttacgctggcgaaaggtaaaccaatcggtaaggaaggttactactggctgaaaatccacggtgcaaactgtgcgggtgtcgataaggttccgttccctgagcgcatcaagttcattgaggaaaaccacgagaacatcatggcttgcgctaagtctccactggagaacacttggtgggctgagcaagatagtccgttctgcttccttgcgttctgctttgagtacgctggggtacagcaccacggcctgagctataactgctcccttccgctggcgtttgacgggtcttgctctggcatccagcacttctccgcgatgctccgagatgaggtaggtggtcgcgcggttaacttgcttcctagtgaaaccgttcaggacatctacgggattgttgctaagaaagtcaacgagattctacaagcagacgcaatcaatgggaccgataacgaagtagttaccgtgaccgatgagaacgaaggtgaaatctctgagaaagtcaagctgggcactaaggcactggctggtcaatggctggcttacggtgttactcgcagtgtgactaagcgttcagtcatgacgctggcttacgggtccaaagagttcggcttccgtcaacaagtgctgcgccacactattcagccagctattgattccggcaagggtctgatgttcactcagccgaatcaggctgctggatacatggctaagctgatttgggaatctgtgagcgtgacggtggtagctgcggttgaagcaatgaactggcttaagtctgctgctaagctgctggctgctgaggtcaaagataagaagactggagagattcttcgcaagcgttgcgctgtgcattgggtaactcctgatggtttccctgtgtggcaggaatacaagaagcctattcagacgcgcttgaacctgatgttcctcggtcagttccgcttacagcctaccattaacaccaacaaagatagcgagattgatgcacataaacaggagtctggtatcgctcctaactttgtacacagccaagacggtagccaccttcgtaagactgtagtgtgggcacacgagaagtacggaatcgaatcttttgcactgattcacgactccttcggtaccattccggctgacgctgcgaacctgttcaaagcagtgcgcgaaactatggttgacacatatgagtcttgtgatgtactggctgatttctacgaccagttcgctgaccagttgcacgagtctcaattggacaaaatgccagcacttccggctaaaggtaacttgaacctccgtgacatcttagagtcggacttcgcgttcgcg

SEQ ID NO: 600 - protein, 890 aa, synthetic construct
  REGION 1..890: note = Variant of RNA polymerase
MHHHHHHMNTINIAKNDFSDIELAAIPFNTLADHYGEGLAREQLALEHESYEMGEARFRKMFERQLKAGEVADNAAAKPLITTLLPKMIARINDWFEEVKAKRGKRPTAFKFLQEIKPEAVAYITIKTTLACLTSADRTTVQAVASAIGRAIEDEARFGRIRDLEAKHFLKNVEEQLNKRVGHVYKKAFMQVVEADMLSKGLLGGEAWSSWHKEDSIHVGVRCIEMLIESTGMVSLHRQNAGVVGQDSETIELAPEYAEAIATRAGALAGISPMFQPCVVPPKPWTGITGGGYWANGRRPLALVRTHSKKGLMRYEDVYMPEVYKAINIAQNTAWSINKWVLAVANVITKWKHCPVEDIPAIEREELPMKPEDIDMNPEALTAWKRAKAAVYRKDKARKSRRILLEFMLEQANKFANHKAIWFPYNMDWRGRVYAVSMFNPQGNDMTKGLLTLAKGKPIGKEGYYWLKIHGANCAGVDKVPFPERIKFIEENHENIMACAKSPLENTWWAEQDSPFCFLAFCFEYAGVQHHGLSYNCSLPLAFDGSCSGIQHFSAMLRDEVGGRAVNLLPSETVQDIYGIVAKKVNEILQADAINGTDNEVVTVTDENEGEISEKVKLGTKALAGQWLAYGVTRSVTKRSVMTLAYGSKEFGFRQQVLRHTIQPAIDSGKGLMFTQPNQAAGYMAKLIWESVSVTVVAAVEAMNWLKSAAKLLAAEVKDKKTGEILRKRCAVHWVTPDGFPVWQEYKKPIQTRLNLMFLGQFRLQPTINTNKDSEIDAHKQESGIAPNFVHSQDGSHLRKTVVWAHEKYGIESFALIHDSFGTIPADAANLFKAVRETMVDTYESCDVLADFYDQFADQLHESQLDKMPALPAKGNLNLRDILESDFAFA

SEQ ID NO: 601 - DNA, 2670 bp, synthetic construct
  misc_feature 1..2670: note = Variant of RNA polymerase
  source 1..2670: mol_type = other DNA
atgcaccatcaccatcaccatatgaacacgattaacatcgctaagaacgacttctctgacatcgaactggctgctatcccgttcaacactctggctgaccattacggtgagggtttagctcgcgaacagttggcccttgagcatgagtcttacgagatgggtgaagcacgtttccgcaagatgtttgagcgtcaacttaaagctggtgaggttgcggataacgctgccgccaagcctctcatcactaccctactccctaagatgattgcacgcatcaacgactggtttgaggaagtgaaagctaagcgcggcaagcgcccgacagccttccagttcctgcaagaaatcaagccggaagccgtagcgtacatcaccattaagaccactctggcttgcctaaccagtgcggaccgtacaaccgttcaggctgtagcaagcgcaatcggtcgggccattgaggacgaggctcgcttcggtcgtatccgtgaccttgaagctaagcacttcctgaaaaacgttgaggaacaactcaacaagcgcgtagggcacgtctacaagaaagcatttatgcaagttgtcgaggctgacatgctctctaagggtctactcggtggcgaggcgtggtcttcgtggcataaggaagactctattcatgtaggagtacgctgcatcgagatgctcattgagtcaaccggaatggttagcttacaccgccaaaatgctggcgtagtaggtcaagactctgagactatcgaactcgcacctgaatacgctgaggctatcgcaacccgtgcaggtgcgctggctggcatctctccgatgttccaaccttgcgtagttcctcctaagccgtggactggcattactggtggtggctattgggctaacggtcgtcgtcctctggcgctggtgcgtactcacagtaagaaaggtctgatgcgctacgaagacgtttacatgcctgaggtgtacaaagcgattaacattgcgcaaaacaccgcctggtcgatcaacaagtgggtcctggcggtcgccaacgtaatcaccaagtggaagcattgtccggtcgaggacatccctgcgattgagcgtgaagaactcccgatgaaaccggaagacatcgacatgaatcctgaggctctcaccgcgtggaaacgtgctaaagctgctgtgtaccgcaaggacaaggctcgcaagtctcgccgtatcttgcttgagttcatgcttgagcaagccaataagtttgctaaccataaggccatctggttcccttacaacatggactggcgcggtcgtgtttacgctgtgtcaatgttcaacccgcaaggtaacgatatgaccaaaggactgcttacgctggcgaaaggtaaaccaatcggtaaggaaggttactactggctgaaaatccacggtgcaaactgtgcgggtgtcgataaggttccgttccctgagcgcatcaagttcattgaggaaaaccacgagaacatcatggcttgcgctaagtctccactggagaacacttggtgggctgagcaagatagtccgttctgcttccttgcgttctgctttgagtacgctggggtacagcaccacggcctgagctataactgctcccttccgctggcgtttgacgggtcttgctctggcatccagcacttctccgcgatgctccgagatgaggtaggtggtcgcgcggttaacttgcttcctagtgaaaccgttcaggacatctacgggattgttgctaagaaagtcaacgagattctacaagcagacgcaatcaatgggaccgataacgaagtagttaccgtgaccgatgagaacgaaggtgaaatctctgagaaagtcaagctgggcactaaggcactggctggtcaatggctggcttacggtgttactcgcagtgtgactaagcgttcagtcatgacgctggcttacgggtccaaagagttcggcttccgtcaacaagtgctgcgccacactattcagccagctattgattccggcaagggtctgatgttcactcagccgaatcaggctgctggatacatggctaagctgatttgggaatctgtgagcgtgacggtggtagctgcggttgaagcaatgaactggcttaagtctgctgctaagctgctggctgctgaggtcaaagataagaagactggagagattcttcgcaagcgttgcgctgtgcattgggtaactcctgatggtttccctgtgtggcaggaatacaagaagcctattcagacgcgcttgaacctgatgttcctcggtcagttccgcttacagcctaccattaacaccaacaaagatagcgagattgatgcacataaacaggagtctggtatcgctcctaactttgtacacagccaagacggtagccaccttcgtaagactgtagtgtgggcacacgagaagtacggaatcgaatcttttgcactgattcacgactccttcggtaccattccggctgacgctgcgaacctgttcaaagcagtgcgcgaaactatggttgacacatatgagtcttgtgatgtactggctgatttctacgaccagttcgctgaccagttgcacgagtctcaattggacaaaatgccagcacttccggctaaaggtaacttgaacctccgtgacatcttagagtcggacttcgcgttcgcg

SEQ ID NO: 602 - protein, 890 aa, synthetic construct
  REGION 1..890: note = Variant of RNA polymerase
MHHHHHHMNTINIAKNDFSDIELAAIPFNTLADHYGEGLAREQLALEHESYEMGEARFRKMFERQLKAGEVADNAAAKPLITTLLPKMIARINDWFEEVKAKRGKRPTAFQFLQEIKPEAVAYITIKTTLACLTSADRTTVQAVASAIGRAIEDEARFGRIRDLEAKHFLKNVEEQLNKRVGHVYKKAFMQVVEADMLSKGLLGGEAWSSWHKEDSIHVGVRCIEMLIESTGMVSLHRQNAGVVGQDSETIELAPEYAEAIATRAGALAGISPMFQPCVVPPKPWTGITGGGYWANGRRPLALVRTHSKKGLMRYEDVYMPEVYKAINIAQNTAWSINKWVLAVANVITKWKHCPVEDIPAIEREELPMKPEDIDMNPEALTAWKRAKAAVYRKDKARKSRRILLEFMLEQANKFANHKAIWFPYNMDWRGRVYAVSMFNPQGNDMTKGLLTLAKGKPIGKEGYYWLKIHGANCAGVDKVPFPERIKFIEENHENIMACAKSPLENTWWAEQDSPFCFLAFCFEYAGVQHHGLSYNCSLPLAFDGSCSGIQHFSAMLRDEVGGRAVNLLPSETVQDIYGIVAKKVNEILQADAINGTDNEVVTVTDENEGEISEKVKLGTKALAGQWLAYGVTRSVTKRSVMTLAYGSKEFGFRQQVLRHTIQPAIDSGKGLMFTQPNQAAGYMAKLIWESVSVTVVAAVEAMNWLKSAAKLLAAEVKDKKTGEILRKRCAVHWVTPDGFPVWQEYKKPIQTRLNLMFLGQFRLQPTINTNKDSEIDAHKQESGIAPNFVHSQDGSHLRKTVVWAHEKYGIESFALIHDSFGTIPADAANLFKAVRETMVDTYESCDVLADFYDQFADQLHESQLDKMPALPAKGNLNLRDILESDFAFA

SEQ ID NO: 603 - DNA, 2670 bp, synthetic construct
  misc_feature 1..2670: note = Variant of RNA polymerase
  source 1..2670: mol_type = other DNA
atgcaccatcaccatcaccatatgaacacgattaacatcgctaagaacgacttctctgacatcgaactggctgctatcccgttcaacactctggtcgaccattacggtgagggtttagctcgcgaacagttggcccttgagcatgagtcttacgagatgggtgaagcacgtttccgcaagatgtttgagcgtcaacttaaagctggtgaggttgcggataacgctgccgccaagcctctcatcactaccctactccctaagatgattgcacgcatcaacgactggtttgaggaagtgaaagctaagcgcggcaagcgcccgacagccttccagttcctgcaagaaatcaagccggaagccgtagcgtacatcaccattaagaccactctggcttgcctaaccagtgcggaccgtacaaccgttcaggctgtagcaagcgcaatcggtcgggccattgaggacgaggctcgcttcggtcgtatccgtgaccttgaagctaagcacttcctgaaaaacgttgaggaacaactcaacaagcgcgtagggcacgtctacaagaaagcatttatgcaagttgtcgaggctgacatgctctctaagggtctactcggtggcgaggcgtggtcttcgtggcataaggaagactctattcatgtaggagtacgctgcatcgagatgctcattgagtcaaccggaatggttagcttacaccgccaaaatgctggcgtagtaggtaaagactctgagactatcgaactcgcacctgaatacgctgaggctatcgcaacccgtgcaggtgcgctggctggcatctctccgatgttccaaccttgcgtagttcctcctaagccgtggactggcattactggtggtggctattgggctaacggtcgtcgtcctctggcgctggtgcgtactcacagtaagaaaggtctgatgcgctacgaagacgtttacatgcctgaggtgtacaaagcgattaacattgcgcaaaacaccgcctggtcgatcaacaagtgggtcctggcggtcgccaacgtaatcaccaagtggaagcattgtccggtcgaggacatccctgcgattgagcgtgaagaactcccgatgaaaccggaagacatcgacatgaatcctgaggctctcaccgcgtggaaacgtgctaaagctgctgtgtaccgcaaggacaaggctcgcaagtctcgccgtatcttgcttgagttcatgcttgagcaagccaataagtttgctaaccataaggccatctggttcccttacaacatggactggcgcggtcgtgtttacgctgtgtcaatgttcaacccgcaaggtaacgatatgaccaaaggactgcttacgctggcgaaaggtaaaccaatcggtaaggaaggttactactggctgaaaatccacggtgcaaactgtgcgggtgtcgataaggttccgttccctgagcgcatcaagttcattgaggaaaaccacgagaacatcatggcttgcgctaagtctccactggagaacacttggtgggctgagcaagatagtccgttctgcttccttgcgttctgctttgagtacgctggggtacagcaccacggcctgagctataactgctcccttccgctggcgtttgacgggtcttgctctggcatccagcacttctccgcgatgctccgagatgaggtaggtggtcgcgcggttaacttgcttcctagtgaaaccgttcaggacatctacgggattgttgctaagaaagtcaacgagattctacaagcagacgcaatcaatgggaccgataacgaagtagttaccgtgaccgatgagaacgaaggtgaaatctctgagaaagtcaagctgggcactaaggcactggctggtcaatggctggcttacggtgttactcgcagtgtgactaagcgttcagtcatgacgctggcttacgggtccaaagagttcggcttccgtcaacaagtgctgcgccacactattcagccagctattgattccggcaagggtctgatgttcactcagccgaatcaggctgctggatacatggctaagctgatttgggaatctgtgagcgtgacggtggtagctgcggttgaagcaatgaactggcttaagtctgctgctaagctgctggctgctgaggtcaaagataagaagactggagagattcttcgcaagcgttgcgctgtgcattgggtaactcctgatggtttccctgtgtggcaggaatacaagaagcctattcagacgcgcttgaacctgatgttcctcggtcagttccgcttacagcctaccattaacaccaacaaagatagcgagattgatgcacataaacaggagtctggtatcgctcctaactttgtacacagccaagacggtagccaccttcgtaagactgtagtgtgggcacacgagaagtacggaatcgaatcttttgcactgattcacgactccttcggtaccattccggctgacgctgcgaacctgttcaaagcagtgcgcgaaactatggttgacacatatgagtcttgtgatgtactggctgatttctacgaccagttcgctgaccagttgcacgagtctcaattggacaaaatgccagcacttccggctaaaggtaacttgaacctccgtgacatcttagagtcggacttcgcgttcgcg

SEQ ID NO: 604 - protein, 890 aa, synthetic construct
  REGION 1..890: note = Variant of RNA polymerase
MHHHHHHMNTINIAKNDFSDIELAAIPFNTLVDHYGEGLAREQLALEHESYEMGEARFRKMFERQLKAGEVADNAAAKPLITTLLPKMIARINDWFEEVKAKRGKRPTAFQFLQEIKPEAVAYITIKTTLACLTSADRTTVQAVASAIGRAIEDEARFGRIRDLEAKHFLKNVEEQLNKRVGHVYKKAFMQVVEADMLSKGLLGGEAWSSWHKEDSIHVGVRCIEMLIESTGMVSLHRQNAGVVGKDSETIELAPEYAEAIATRAGALAGISPMFQPCVVPPKPWTGITGGGYWANGRRPLALVRTHSKKGLMRYEDVYMPEVYKAINIAQNTAWSINKWVLAVANVITKWKHCPVEDIPAIEREELPMKPEDIDMNPEALTAWKRAKAAVYRKDKARKSRRILLEFMLEQANKFANHKAIWFPYNMDWRGRVYAVSMFNPQGNDMTKGLLTLAKGKPIGKEGYYWLKIHGANCAGVDKVPFPERIKFIEENHENIMACAKSPLENTWWAEQDSPFCFLAFCFEYAGVQHHGLSYNCSLPLAFDGSCSGIQHFSAMLRDEVGGRAVNLLPSETVQDIYGIVAKKVNEILQADAINGTDNEVVTVTDENEGEISEKVKLGTKALAGQWLAYGVTRSVTKRSVMTLAYGSKEFGFRQQVLRHTIQPAIDSGKGLMFTQPNQAAGYMAKLIWESVSVTVVAAVEAMNWLKSAAKLLAAEVKDKKTGEILRKRCAVHWVTPDGFPVWQEYKKPIQTRLNLMFLGQFRLQPTINTNKDSEIDAHKQESGIAPNFVHSQDGSHLRKTVVWAHEKYGIESFALIHDSFGTIPADAANLFKAVRETMVDTYESCDVLADFYDQFADQLHESQLDKMPALPAKGNLNLRDILESDFAFA

SEQ ID NO: 605 - DNA, 2670 bp, synthetic construct
  misc_feature 1..2670: note = Variant of RNA polymerase
  source 1..2670: mol_type = other DNA
atgcaccatcaccatcaccatatgaacacgattaacatcgctaagaacgacttctctgacatcgaactggctgctatcccgttcaacactctggctgaccattacggtgagggtttagctcgcgaacagttggcccttgagcatgagtcttacgagatgggtgaagcacgtttccgcaagatgtttgagcgtcaacttaaagctggtgaggttgcggataacgctgccgccaagcctctcatcactaccctactccctaagatgattgcacgcatcaacgactggtttgaggaagtgaaagctaagcgcggcaagcgcccgacagccttccagttcctgcaagaaatcaagccggaagccgtagcgtacatcaccattaagaccactctggcttgcctaaccagtgcggaccgtacaaccgttcaggctgtagcaagcgcaatcggtcgggccattgaggacgaggctcgcttcggtcgtatccgtgaccttgaagctaagcacttcctgaaaaacgttgaggaacaactcaacaagcgcgtagggcacgtctacaagaaagcatttatgcaagttgtcgaggctgacatgctctctaagggtctactcggtggcgaggcgtggtcttcgtggcataaggaagactctattcatgtaggagtacgctgcatcgagatgctcattgagtcaaccggaatggttagcttacaccgccaaaatgctggcgtagtaggtaaagactctgagactatcgaactcgcacctgaatacgctgaggctatcgcaacccgtgcaggtgcgctggctggcatctctccgatgttccaaccttgcgtagttcctcctaagccgtggactggcattactggtggtggctattgggctaacggtcgtcgtcctctggcgctggtgcgtactcacagtaagaaaggtctgatgcgctacgaagacgtttacatgcctgaggtgtacaaagcgattaacattgcgcaaaacaccgcctggtcgatcaacaagtgggtcctggcggtcgccaacgtaatcaccaagtggaagcattgtccggtcgaggacatccctgcgattgagcgtgaagaactcccgatgaaaccggaagacatcgacatgaatcctgaggctctcaccgcgtggaaacgtgctaaagctgctgtgtaccgcaaggacaaggctcgcaagtctcgccgtatcttgcttgagttcatgcttgagcaagccaataagtttgctaaccataaggccatctggttcccttacaacatggactggcgcggtcgtgtttacgctgtgtcaatgttcaacccgcaaggtaacgatatgaccaaaggactgcttacgctggcgaaaggtaaaccaatcggtaaggaaggttactactggctgaaaatccacggtgcaaactgtgcgggtgtcgataaggttccgttccctgagcgcatcaagttcattgaggaaaaccacgagaacatcatggcttgcgctaagtctccactggagaacacttggtgggctgagcaagatagtccgttctgcttccttgcgttctgctttgagtacgctggggtacagcaccaaggctcgagctataactgctcccttccgctggcgtttgacgggtcttgctctggcatccagcacttctccgcgatgctccgagatgaggtaggtggtcgcgcggttaacttgcttcctagtgaaaccgttcaggacatctacgggattgttgctaagaaagtcaacgagattctacaagcagacgcaatcaatgggaccgataacgaagtagttaccgtgaccgatgagaacgaaggtgaaatctctgagaaagtcaagctgggcactaaggcactggctggtcaatggctggcttacggtgttactcgcagtgtgactaagcgttcagtcatgacgctggcttacgggtccaaagagttcggcttccgtcaacaagtgctgcgccacactattcagccagctattgattccggcaagggtctgatgttcactcagccgaatcaggctgctggatacatggctaagctgatttgggaatctgtgagcgtgacggtggtagctgcggttgaagcaatgaactggcttaagtctgctgctaagctgctggctgctgaggtcaaagataagaagactggagagattcttcgcaagcgttgcgctgtgcattgggtaactcctgatggtttccctgtgtggcaggaatacaagaagcctattcagacgcgcttgaacctgatgttcctcggtcagttccgcttacagcctaccattaacaccaacaaagatagcgagattgatgcacataaacaggagtctggtatcgctcctaactttgtacacagccaagacggtagccaccttcgtaagactgtagtgtgggcacacgagaagtacggaatcgaatcttttgcactgattcacgactccttcggtaccattccggctgacgctgcgaacctgttcaaagcagtgcgcgaaactatggttgacacatatgagtcttgtgatgtactggctgatttctacgaccagttcgctgaccagttgcacgagtctcaattggacaaaatgccagcacttccggctaaaggtaacttgaacctccgtgacatcttagagtcggacttcgcgttcgcg

SEQ ID NO: 606 - protein, 890 aa, synthetic construct
  REGION 1..890: note = Variant of RNA polymerase
MHHHHHHMNTINIAKNDFSDIELAAIPFNTLADHYGEGLAREQLALEHESYEMGEARFRKMFERQLKAGEVADNAAAKPLITTLLPKMIARINDWFEEVKAKRGKRPTAFQFLQEIKPEAVAYITIKTTLACLTSADRTTVQAVASAIGRAIEDEARFGRIRDLEAKHFLKNVEEQLNKRVGHVYKKAFMQVVEADMLSKGLLGGEAWSSWHKEDSIHVGVRCIEMLIESTGMVSLHRQNAGVVGKDSETIELAPEYAEAIATRAGALAGISPMFQPCVVPPKPWTGITGGGYWANGRRPLALVRTHSKKGLMRYEDVYMPEVYKAINIAQNTAWSINKWVLAVANVITKWKHCPVEDIPAIEREELPMKPEDIDMNPEALTAWKRAKAAVYRKDKARKSRRILLEFMLEQANKFANHKAIWFPYNMDWRGRVYAVSMFNPQGNDMTKGLLTLAKGKPIGKEGYYWLKIHGANCAGVDKVPFPERIKFIEENHENIMACAKSPLENTWWAEQDSPFCFLAFCFEYAGVQHQGSSYNCSLPLAFDGSCSGIQHFSAMLRDEVGGRAVNLLPSETVQDIYGIVAKKVNEILQADAINGTDNEVVTVTDENEGEISEKVKLGTKALAGQWLAYGVTRSVTKRSVMTLAYGSKEFGFRQQVLRHTIQPAIDSGKGLMFTQPNQAAGYMAKLIWESVSVTVVAAVEAMNWLKSAAKLLAAEVKDKKTGEILRKRCAVHWVTPDGFPVWQEYKKPIQTRLNLMFLGQFRLQPTINTNKDSEIDAHKQESGIAPNFVHSQDGSHLRKTVVWAHEKYGIESFALIHDSFGTIPADAANLFKAVRETMVDTYESCDVLADFYDQFADQLHESQLDKMPALPAKGNLNLRDILESDFAFA

SEQ ID NO: 607 - DNA, 2670 bp, synthetic construct
  misc_feature 1..2670: note = Variant of RNA polymerase
  source 1..2670: mol_type = other DNA
atgcaccatcaccatcaccatatgaacacgattaacatcgctaagaacgacttctctgacatcgaactggctgctatcccgttcaacactctggcggaccattacggtgagggtttagctcgcgaacagttggcccttgagcatgagtcttacgagatgggtgaagcacgtttccgcaagatgtttgagcgtcaacttaaagctggtgaggttgcggataacgctgccgccaagcctctcatcactaccctactccctaagatgattgcacgcatcaacgactggtttgaggaagtgaaagctaagcgcggcaagcgcccgacagccttccagttcctgcaactgatcaagccggaagccgtagcgtacatcaccattaagaccactctggcttgcctaaccagtgcggaccgtaccactgttcaggctgtagcaagcgcaatcggtcgggccattgaggacgaggctcgcttcggtcgtatccgtgaccttgaagctaagcacttcctgaaaaacgttgaggaacaactcaacaagcgcgtagggcacgtctacaagaaagcatttatgcaagttgtcgaggctgacatgctctctaagggtctactcggtggcgaggcgtggtcttcgtggcataaggaagactctattcatgtaggagtacgctgcatcgagatgctcattgagtcaaccggaatggttagcttacaccgccaaaatgctggcgtagtaggtaaagactctgagactatcgaactcgcacctgaatacgctgaggctatcgcaacccgtgcaggtgcgctggctggcatctctccgatgttccaaccttgcgtagttcctcctaagccgtggactggcattactggtggtggctattgggctaacggtcgtcgtcctctggcgctggtgcgtactcacagtaagaaaggtctgatgcgctacgaagacgtttacatgcctgaggtgtacaaagcgattaacattgcgcaaaacaccgcctggtcgatcaacaagtgggtcctggcggtcgccaacgtaatcaccaagtggaagcattgtccggtcgaggacatccctgcgattgagcgtgaagaactcccgatgaaaccggaagacatcgacatgaatcctgaggctctcaccgcgtggaaacgtgctaaagctgctgtgtaccgcaaggacaaggctcgcaagtctcgccgtatcttgcttgagttcatgcttgagcaagccaataagtttgctaaccataaggccatctggttcccttacaacatggactggcgcggtcgtgtttacgctgtgtcaatgttcaacccgcaaggtaacgatatgaccaaaggactgcttacgctggcgaaaggtaaaccaatcggtaaggaaggttactactggctgaaaatccacggtgcaaactgtgcgggtgtcgataaggttccgttccctgagcgcatcaagttcattgaggaaaaccacgagaacatcatggcttgcgctaagtctccactggagaacacttggtgggctgagcaagatagtccgttctgcttccttgcgttctgctttgagtacgctggggtacagcaccacggcctgagctataactgctcccttccgctggcgtttgacgggtcttgctctggcatccagcacttctccgcgatgctccgagatgaggtaggtggtcgcgcggttaacttgcttcctagtgaaaccgttcaggacatctacgggattgttgctaagaaagtcaacgagattctacaagcagacgcaatcaatgggaccgataacgaagtagttaccgtgaccgatgagaacgaaggtgaaatctctgagaaagtcaagctgggcactaaggcactggctggtcaatggctggcttacggtgttactcgcagtgtgactaagcgttcagtcatgacgctggcttacgggtccaaagagttcggcttccgtcaacaagtgctgcgccacactattcagccagctattgattccggcaagggtctgatgttcactcagccgaatcaggctgctggatacatggctaagctgatttgggaatctgtgagcgtgacggtggtagctgcggttgaagcaatgaactggcttaagtctgctgctaagctgctggctgctgaggtcaaagataagaagactggagagattcttcgcaagcgttgcgctgtgcattgggtaactcctgatggtttccctgtgtggcaggaatacaagaagcctattcagacgcgcttgaacctgatgttcctcggtcagttccgcttacagcctaccattaacaccaacaaagatagcgagattgatgcacataaacaggagtctggtatcgctcctaactttgtacacagccaagacggtagccaccttcgtaagactgtagtgtgggcacacgagaagtacggaatcgaatcttttgcactgattcacgactccttcggtaccattccggctgacgctgcgaacctgttcaaagcagtgcgcgaaactatggttgacacatatgagtcttgtgatgtactggctgatttctacgaccagttcgctgaccagttgcacgagtctcaattggacaaaatgccagcacttccggctaaaggtaacttgaacctccgtgacatcttagagtcggacttcgcgttcgcg

SEQ ID NO: 608 - protein, 890 aa, synthetic construct
  REGION 1..890: note = Variant of RNA polymerase
MHHHHHHMNTINIAKNDFSDIELAAIPFNTLADHYGEGLAREQLALEHESYEMGEARFRKMFERQLKAGEVADNAAAKPLITTLLPKMIARINDWFEEVKAKRGKRPTAFQFLQLIKPEAVAYITIKTTLACLTSADRTTVQAVASAIGRAIEDEARFGRIRDLEAKHFLKNVEEQLNKRVGHVYKKAFMQVVEADMLSKGLLGGEAWSSWHKEDSIHVGVRCIEMLIESTGMVSLHRQNAGVVGKDSETIELAPEYAEAIATRAGALAGISPMFQPCVVPPKPWTGITGGGYWANGRRPLALVRTHSKKGLMRYEDVYMPEVYKAINIAQNTAWSINKWVLAVANVITKWKHCPVEDIPAIEREELPMKPEDIDMNPEALTAWKRAKAAVYRKDKARKSRRILLEFMLEQANKFANHKAIWFPYNMDWRGRVYAVSMFNPQGNDMTKGLLTLAKGKPIGKEGYYWLKIHGANCAGVDKVPFPERIKFIEENHENIMACAKSPLENTWWAEQDSPFCFLAFCFEYAGVQHHGLSYNCSLPLAFDGSCSGIQHFSAMLRDEVGGRAVNLLPSETVQDIYGIVAKKVNEILQADAINGTDNEVVTVTDENEGEISEKVKLGTKALAGQWLAYGVTRSVTKRSVMTLAYGSKEFGFRQQVLRHTIQPAIDSGKGLMFTQPNQAAGYMAKLIWESVSVTVVAAVEAMNWLKSAAKLLAAEVKDKKTGEILRKRCAVHWVTPDGFPVWQEYKKPIQTRLNLMFLGQFRLQPTINTNKDSEIDAHKQESGIAPNFVHSQDGSHLRKTVVWAHEKYGIESFALIHDSFGTIPADAANLFKAVRETMVDTYESCDVLADFYDQFADQLHESQLDKMPALPAKGNLNLRDILESDFAFA

SEQ ID NO: 609 - DNA, 2670 bp, synthetic construct
  misc_feature 1..2670: note = Variant of RNA polymerase
  source 1..2670: mol_type = other DNA
atgcaccatcaccatcaccatatgaacacgattaacatcgctaagaacgacttctctgacatcgaactggctgctatcccgttcaacactctggctgaccattacggtgagggtttagctcgcgaacagttggcccttgagcatgagtcttacgagatgggtgaagcacgtttccgcaagatgtttgagcgtcaacttaaagctggtgaggttgcggataacgctgccgccaagcctctcatcactaagctgctccctaagatgattgcacgcatcaacgactggtttgaggaagtgaaagctaagcgcggcaagcgcccgacagccttccagttcctgcaagaaatcaagccggaagccgtagcgtacatcaccattaagaccactctggcttgcctaaccagtgcggaccgtacaactgttcaggctgtagcaagcgcaatcggtcgggccattgaggacgaggctcgcttcggtcgtatccgtgaccttgaagctaagcacttcctgaaaaacgttgaggaacaactcaacaagcgcgtagggcacgtctacaagaaagcatttatgcaagttgtcgaggctgacatgctctctaagggtctactcggtggcgaggcgtggtcttcgtggcataaggaagactctattcatgtaggagtacgctgcatcgagatgctcattgagtcaaccggaatggttagcttacaccgccaaaatgctggcgtagtaggtaaagactctgagactatcgaactcgcacctgaatacgctgaggctatcgcaacccgtgcaggtgcgctggctggcatctctccgatgttccaaccttgcgtagttcctcctaagccgtggactggcattactggtggtggctattgggctaacggtcgtcgtcctctggcgctggtgcgtactcacagtaagaaaggtctgatgcgctacgaagacgtttacatgcctgaggtgtacaaagcgattaacattgcgcaaaacaccgcctggtcgatcaacaagtgggtcctggcggtcgccaacgtaatcaccaagtggaagcattgtccggtcgaggacatccctgcgattgagcgtgaagaactcccgatgaaaccggaagacatcgacatgaatcctgaggctctcaccgcgtggaaacgtgctaaagctgctgtgtaccgcaaggacaaggctcgcaagtctcgccgtatcttgcttgagttcatgcttgagcaagccaataagtttgctaaccataaggccatctggttcccttacaacatggactggcgcggtcgtgtttacgctgtgtcaatgttcaacccgcaaggtaacgatatgaccaaaggactgcttacgctggcgaaaggtaaaccaatcggtaaggaaggttactactggctgaaaatccacggtgcaaactgtgcgggtgtcgataaggttccgttccctgagcgcatcaagttcattgaggaaaaccacgagaacatcatggcttgcgctaagtctccactggagaacacttggtgggctgagcaagatagtccgttctgcttccttgcgttctgctttgagtacgctggggtacagcaccacggcctgagctataactgctcccttccgctggcgtttgacgggtcttgctctggcatccagcacttctccgcgatgctccgagatgaggtaggtggtcgcgcggttaacttgcttcctagtgaaaccgttcaggacatctacgggattgttgctaagaaagtcaacgagattctacaagcagacgcaatcaatgggaccgataacgaagtagttaccgtgaccgatgagaacgaaggtgaaatctctgagaaagtcaagctgggcactaaggcactggctggtcaatggctggcttacggtgttactcgcagtgtgactaagcgttcagtcatgacgctggcttacgggtccaaagagttcggcttccgtcaacaagtgctgcgccacactattcagccagctattgattccggcaagggtctgatgttcactcagccgaatcaggctgctggatacatggctaagctgatttgggaatctgtgagcgtgacggtggtagctgcggttgaagcaatgaactggcttaagtctgctgctaagctgctggctgctgaggtcaaagataagaagactggagagattcttcgcaagcgttgcgctgtgcattgggtaactcctgatggtttccctgtgtggcaggaatacaagaagcctattcagacgcgcttgaacctgatgttcctcggtcagttccgcttacagcctaccattaacaccaacaaagatagcgagattgatgcacataaacaggagtctggtatcgctcctaactttgtacacagccaagacggtagccaccttcgtaagactgtagtgtgggcacacgagaagtacggaatcgaatcttttgcactgattcacgactccttcggtaccattccggctgacgctgcgaacctgttcaaagcagtgcgcgaaactatggttgacacatatgagtcttgtgatgtactggctgatttctacgaccagttcgctgaccagttgcacgagtctcaattggacaaaatgccagcacttccggctaaaggtaacttgaacctccgtgacatcttagagtcggacttcgcgttcgcg

SEQ ID NO: 610 - protein, 890 aa, synthetic construct
  REGION 1..890: note = Variant of RNA polymerase
MHHHHHHMNTINIAKNDFSDIELAAIPFNTLADHYGEGLAREQLALEHESYEMGEARFRKMFERQLKAGEVADNAAAKPLITKLLPKMIARINDWFEEVKAKRGKRPTAFQFLQEIKPEAVAYITIKTTLACLTSADRTTVQAVASAIGRAIEDEARFGRIRDLEAKHFLKNVEEQLNKRVGHVYKKAFMQVVEADMLSKGLLGGEAWSSWHKEDSIHVGVRCIEMLIESTGMVSLHRQNAGVVGKDSETIELAPEYAEAIATRAGALAGISPMFQPCVVPPKPWTGITGGGYWANGRRPLALVRTHSKKGLMRYEDVYMPEVYKAINIAQNTAWSINKWVLAVANVITKWKHCPVEDIPAIEREELPMKPEDIDMNPEALTAWKRAKAAVYRKDKARKSRRILLEFMLEQANKFANHKAIWFPYNMDWRGRVYAVSMFNPQGNDMTKGLLTLAKGKPIGKEGYYWLKIHGANCAGVDKVPFPERIKFIEENHENIMACAKSPLENTWWAEQDSPFCFLAFCFEYAGVQHHGLSYNCSLPLAFDGSCSGIQHFSAMLRDEVGGRAVNLLPSETVQDIYGIVAKKVNEILQADAINGTDNEVVTVTDENEGEISEKVKLGTKALAGQWLAYGVTRSVTKRSVMTLAYGSKEFGFRQQVLRHTIQPAIDSGKGLMFTQPNQAAGYMAKLIWESVSVTVVAAVEAMNWLKSAAKLLAAEVKDKKTGEILRKRCAVHWVTPDGFPVWQEYKKPIQTRLNLMFLGQFRLQPTINTNKDSEIDAHKQESGIAPNFVHSQDGSHLRKTVVWAHEKYGIESFALIHDSFGTIPADAANLFKAVRETMVDTYESCDVLADFYDQFADQLHESQLDKMPALPAKGNLNLRDILESDFAFA

SEQ ID NO: 611 - DNA, 2670 bp, synthetic construct
  misc_feature 1..2670: note = Variant of RNA polymerase
  source 1..2670: mol_type = other DNA
atgcaccatcaccatcaccatatgaacacgattaacatcgctaagaacgacttctctgacatcgaactggctgctatcccgttcaacactctggtcgaccattacggtgagggtttagctcgcgaacagttggcccttgagcatgagtcttacgagatgggtgaagcacgtttccgcatgtggtttgagcgtcaacttaaagctggtgaggttgcggataacgctgccgccaagcctctcatcactaccctactccctaagatgattgcacgcatcaacgactggtttgaggaagtgaaagctaagcgcggcaagcgcccgacagccttccagttcctgcaagagatcaagccggaagccgtagcgtacatcaccattaagaccactctggcttgcctaaccagtgcggaccgtaccactgttcaggctgtagcaagcgcaatcggtcgggccattgaggacgaggctcgcttcggtcgtatccgtgaccttgaagctaagcacttcctgaaaaacgttgaggaacaactcaacaagcgcgtagggcacgtctacaagaaagcatttatgcaagttgtcgaggctgacatgctctctaagggtctactcggtggcgaggcgtggtcttcgtggcataaggaagactctattcatgtaggagtacgctgcatcgagatgctcattgagtcaaccggaatggttagcttacaccgccaaaatgctggcgtagtaggtaaagactctgagactatcgaactcgcacctgaatacgctgaggctatcgcaacccgtgcaggtgcgctggctggcatctctccgatgttccaaccttgcgtagttcctcctaagccgtggactggcattactggtggtggctattgggctaacggtcgtcgtcctctggcgctggtgcgtactcacagtaagaaaggtctgatgcgctacgaagacgtttacatgcctgaggtgtacaaagcgattaacattgcgcaaaacaccgcctggtcgatcaacaagtgggtcctggcggtcgccaacgtaatcaccaagtggaagcattgtccggtcgaggacatccctgcgattgagcgtgaagaactcccgatgaaaccggaagacatcgacatgaatcctgaggctctcaccgcgtggaaacgtgctaaagctgctgtgtaccgcaaggacaaggctcgcaagtctcgccgtatcttgcttgagttcatgcttgagcaagccaataagtttgctaaccataaggccatctggttcccttacaacatggactggcgcggtcgtgtttacgctgtgtcaatgttcaacccgcaaggtaacgatatgaccaaaggactgcttacgctggcgaaaggtaaaccaatcggtaaggaaggttactactggctgaaaatccacggtgcaaactgtgcgggtgtcgataaggttccgttccctgagcgcatcaagttcattgaggaaaaccacgagaacatcatggcttgcgctaagtctccactggagaacacttggtgggctgagcaagatagtccgttctgcttccttgcgttctgctttgagtacgctggggtacagcaccacggcctgagctataactgctcccttccgctggcgtttgacgggtcttgctctggcatccagcacttctccgcgatgctccgagatgaggtaggtggtcgcgcggttaacttgcttcctagtgaaaccgttcaggacatctacgggattgttgctaagaaagtcaacgagattctacaagcagacgcaatcaatgggaccgataacgaagtagttaccgtgaccgatgagaacgaaggtgaaatctctgagaaagtcaagctgggcactaaggcactggctggtcaatggctggcttacggtgttactcgcagtgtgactaagcgttcagtcatgacgctggcttacgggtccaaagagttcggcttccgtcaacaagtgctgcgccacactattcagccagctattgattccggcaagggtctgatgttcactcagccgaatcaggctgctggatacatggctaagctgatttgggaatctgtgagcgtgacggtggtagctgcggttgaagcaatgaactggcttaagtctgctgctaagctgctggctgctgaggtcaaagataagaagactggagagattcttcgcaagcgttgcgctgtgcattgggtaactcctgatggtttccctgtgtggcaggaatacaagaagcctattcagacgcgcttgaacctgatgttcctcggtcagttccgcttacagcctaccattaacaccaacaaagatagcgagattgatgcacataaacaggagtctggtatcgctcctaactttgtacacagccaagacggtagccaccttcgtaagactgtagtgtgggcacacgagaagtacggaatcgaatcttttgcactgattcacgactccttcggtaccattccggctgacgctgcgaacctgttcaaagcagtgcgcgaaactatggttgacacatatgagtcttgtgatgtactggctgatttctacgaccagttcgctgaccagttgcacgagtctcaattggacaaaatgccagcacttccggctaaaggtaacttgaacctccgtgacatcttagagtcggacttcgcgttcgcg

SEQ ID NO: 612 - protein, 890 aa, synthetic construct
  REGION 1..890: note = Variant of RNA polymerase
MHHHHHHMNTINIAKNDFSDIELAAIPFNTLVDHYGEGLAREQLALEHESYEMGEARFRMWFERQLKAGEVADNAAAKPLITTLLPKMIARINDWFEEVKAKRGKRPTAFQFLQEIKPEAVAYITIKTTLACLTSADRTTVQAVASAIGRAIEDEARFGRIRDLEAKHFLKNVEEQLNKRVGHVYKKAFMQVVEADMLSKGLLGGEAWSSWHKEDSIHVGVRCIEMLIESTGMVSLHRQNAGVVGKDSETIELAPEYAEAIATRAGALAGISPMFQPCVVPPKPWTGITGGGYWANGRRPLALVRTHSKKGLMRYEDVYMPEVYKAINIAQNTAWSINKWVLAVANVITKWKHCPVEDIPAIEREELPMKPEDIDMNPEALTAWKRAKAAVYRKDKARKSRRILLEFMLEQANKFANHKAIWFPYNMDWRGRVYAVSMFNPQGNDMTKGLLTLAKGKPIGKEGYYWLKIHGANCAGVDKVPFPERIKFIEENHENIMACAKSPLENTWWAEQDSPFCFLAFCFEYAGVQHHGLSYNCSLPLAFDGSCSGIQHFSAMLRDEVGGRAVNLLPSETVQDIYGIVAKKVNEILQADAINGTDNEVVTVTDENEGEISEKVKLGTKALAGQWLAYGVTRSVTKRSVMTLAYGSKEFGFRQQVLRHTIQPAIDSGKGLMFTQPNQAAGYMAKLIWESVSVTVVAAVEAMNWLKSAAKLLAAEVKDKKTGEILRKRCAVHWVTPDGFPVWQEYKKPIQTRLNLMFLGQFRLQPTINTNKDSEIDAHKQESGIAPNFVHSQDGSHLRKTVVWAHEKYGIESFALIHDSFGTIPADAANLFKAVRETMVDTYESCDVLADFYDQFADQLHESQLDKMPALPAKGNLNLRDILESDFAFA

SEQ ID NO: 613 - DNA, 2670 bp, synthetic construct
  misc_feature 1..2670: note = Variant of RNA polymerase
  source 1..2670: mol_type = other DNA
atgcaccatcaccatcaccatatgaacacgattaacatcgctaagaacgacttctctgacatcgaactggctgctatcccgttcaacactctggctgaccattacggtgagggtttagctcgcgaacagttggcccttgagcatgagtcttacgagatgggtgatgcacgtttccgcaagatgtttgagcgtcaacttaaagctggtgaggttgcggataacgctgccgccaagcctctcatcactaccctactccctaagatgattgcacgcatcaacgactggtttgaggaagtgaaagctaagcgcggcaagcgcccgacagccttccagttcctgcaagaaatcaagccggaagccgtagcgtacatcaccattaagaccactctggcttgcctaaccagtgcggaccgtacaaccgttcaggctgtagcaagcgcaatcggtcgggccattgaggacgaggctcgcttcggtcgtatccgtgaccttgaagctaagcacttcctgaaaaacgttgaggaacaactcaacaagcgcgtagggcacgtctacaagaaagcatttatgcaagttgtcgaggctgacatgctctctaagggtctactcggtggcgaggcgtggtcttcgtggcataaggaagactctattcatgtaggagtacgctgcatcgagatgctcattgagtcaaccggaatggttagcttacaccgccaaaatgctggcgtagtaggtaaagactctgagactatcgaactcgcacctgaatacgctgaggctatcgcaacccgtgcaggtgcgctggctggcatctctccgatgttccaaccttgcgtagttcctcctaagccgtggactggcattactggtggtggctattgggctaacggtcgtcgtcctctggcgctggtgcgtactcacagtaagaaaggtctgatgcgctacgaagacgtttacatgcctgaggtgtacaaagcgattaacattgcgcaaaacaccgcctggtcgatcaacaagtgggtcctggcggtcgccaacgtaatcaccaagtggaagcattgtccggtcgaggacatccctgcgattgagcgtgaagaactcccgatgaaaccggaagacatcgacatgaatcctgaggctctcaccgcgtggaaacgtgctaaagctgctgtgtaccgcaaggacaaggctcgcaagtctcgccgtatcttgcttgagttcatgcttgagcaagccaataagtttgctaaccataaggccatctggttcccttacaacatggactggcgcggtcgtgtttacgctgtgtcaatgttcaacccgcaaggtaacgatatgaccaaaggactgcttacgctggcgaaaggtaaaccaatcggtaaggaaggttactactggctgaaaatccacggtgcaaactgtgcgggtgtcgataaggttccgttccctgagcgcatcaagttcattgaggaaaaccacgagaacatcatggcttgcgctaagtctccactggagaacacttggtgggctgagcaagatagtccgttctgcttccttgcgttctgctttgagtacgctggggtacagcaccacggcctgagctataactgctcccttccgctggcgtttgacgggtcttgctctggcatccagcacttctccgcgatgctccgagatgaggtaggtggtcgcgcggttaacttgcttcctagtgaaaccgttcaggacatctacgggattgttgctaagaaagtcaacgagattctacaagcagacgcaatcaatgggaccgataacgaagtagttaccgtgaccgatgagaacgaaggtgaaatctctgagaaagtcaagctgggcactaaggcactggctggtcaatggctggcttacggtgttactcgcagtgtgactaagcgttcagtcatgacgctggcttacgggtccaaagagttcggcttccgtcaacaagtgctgcgccacactattcagccagctattgattccggcaagggtctgatgttcactcagccgaatcaggctgctggatacatggctaagctgatttgggaatctgtgagcgtgacggtggtagctgcggttgaagcaatgaactggcttaagtctgctgctaagctgctggctgctgaggtcaaagataagaagactggagagattcttcgcaagcgttgcgctgtgcattgggtaactcctgatggtttccctgtgtggcaggaatacaagaagcctattcagacgcgcttgaacctgatgttcctcggtcagttccgcttacagcctaccattaacaccaacaaagatagcgagattgatgcacataaacaggagtctggtatcgctcctaactttgtacacagccaagacggtagccaccttcgtaagactgtagtgtgggcacacgagaagtacggaatcgaatcttttgcactgattcacgactccttcggtaccattccggctgacgctgcgaacctgttcaaagcagtgcgcgaaactatggttgacacatatgagtcttgtgatgtactggctgatttctacgaccagttcgctgaccagttgcacgagtctcaattggacaaaatgccagcacttccggctaaaggtaacttgaacctccgtgacatcttagagtcggacttcgcgttcgcg

SEQ ID NO: 614 - protein, 890 aa, synthetic construct
  REGION 1..890: note = Variant of RNA polymerase
MHHHHHHMNTINIAKNDFSDIELAAIPFNTLADHYGEGLAREQLALEHESYEMGDARFRKMFERQLKAGEVADNAAAKPLITTLLPKMIARINDWFEEVKAKRGKRPTAFQFLQEIKPEAVAYITIKTTLACLTSADRTTVQAVASAIGRAIEDEARFGRIRDLEAKHFLKNVEEQLNKRVGHVYKKAFMQVVEADMLSKGLLGGEAWSSWHKEDSIHVGVRCIEMLIESTGMVSLHRQNAGVVGKDSETIELAPEYAEAIATRAGALAGISPMFQPCVVPPKPWTGITGGGYWANGRRPLALVRTHSKKGLMRYEDVYMPEVYKAINIAQNTAWSINKWVLAVANVITKWKHCPVEDIPAIEREELPMKPEDIDMNPEALTAWKRAKAAVYRKDKARKSRRILLEFMLEQANKFANHKAIWFPYNMDWRGRVYAVSMFNPQGNDMTKGLLTLAKGKPIGKEGYYWLKIHGANCAGVDKVPFPERIKFIEENHENIMACAKSPLENTWWAEQDSPFCFLAFCFEYAGVQHHGLSYNCSLPLAFDGSCSGIQHFSAMLRDEVGGRAVNLLPSETVQDIYGIVAKKVNEILQADAINGTDNEVVTVTDENEGEISEKVKLGTKALAGQWLAYGVTRSVTKRSVMTLAYGSKEFGFRQQVLRHTIQPAIDSGKGLMFTQPNQAAGYMAKLIWESVSVTVVAAVEAMNWLKSAAKLLAAEVKDKKTGEILRKRCAVHWVTPDGFPVWQEYKKPIQTRLNLMFLGQFRLQPTINTNKDSEIDAHKQESGIAPNFVHSQDGSHLRKTVVWAHEKYGIESFALIHDSFGTIPADAANLFKAVRETMVDTYESCDVLADFYDQFADQLHESQLDKMPALPAKGNLNLRDILESDFAFA

SEQ ID NO: 615 - DNA, 2670 bp, synthetic construct
  misc_feature 1..2670: note = Variant of RNA polymerase
  source 1..2670: mol_type = other DNA
atgcaccatcaccatcaccatatgaacacgattaacatcgctaagaacgacttctctgacatcgaactggctgctatcccgttcaacactctggctgaccattacggtgagggtttagctcgcgaacagttggcccttgagcatgagtcttacgagatgggtgaagcacgtttccgcaagatgtttgagcgtcaacttaaagctggtgaggttgcggataacgctgccgccaagcctctcatcactaccctactccctaagatgattgcacgcatcaacgactggtttgaggaagtgaaagctaagcgcggcaagcgcccgacagccttccagttcctgcaagaaatcaagccggaagccgtagcgtacatcaccattaagaccactctggcttgcctaaccagtgcggaccgtacaaccgttcaggctgtagcaagcgcaatcggtcgggccattgaggacgaggctcgcttcggtcgtatccgtgaccttgaagctaagcacttcctgaaaaacgttgaggaacaactcaacaagcgcgtagggcacgtctacaagaaagcatttatgcaagttgtcgaggctgacatgctctctaagggtctactcggtggcgaggcgtggtcttcgtggcataaggaagactctattcatgtaggagtacgctgcatcgagatgctcattgagtcaaccggaatggttagcttacaccgccaaaatgctggcgtagtaggtaaagactctgagactatcgaactcgcacctgaatacgctgaggctatcgcaacccgtgcaggtgcgctggctggcatctctccgatgttccaaccttgcgtagttcctcctaagccgtggactggcattactggtggtggctattgggctaacggtcgtcgtcctctggcgctggtgcgtactcacagtaagaaaggtctgatgcgctacgaagacgtttacatgcctgaggtgtacaaagcgattaacattgcgcaaaacaccgcctggtcgatcaacaagtgggtcctggcggtcgccaacgtaatcaccaagtggaagcattgtccggtcgaggacatccctgcgattgagcgtgaagaactcccgatgaaaccggaagacatcgacatgaatcctgaggctctcaccgcgtggaaacgtgctaaagctgctgtgtaccgcaaggacaaggctcgcaagtctcgccgtatcttgcttgagttcatgcttgagcaagccaataagtttgctaaccataaggccatctggttcccttacaacatggactggcgcggtcgtgtttacgctgtgtcaatgttcaacccgcaaggtaacgatatgaccaaaggactgcttacgctggcgaaaggtaaaccaatcggtaaggaaggttactactggctgaaaatccacggtgcaaactgtgcgggtgtcgataaggttccgttccctgagcgcatcaagttcattgaggaaaaccacgagaacatcatggcttgcgctaagtctccactggagaacacttggtgggctgagcaagatagtccgttctgcttccttgcgttctgctttgagtacgctggggtacagcaccacggcctgagctataactgctcccttccgctggcgtttgacgggtcttgctctggcatccagcacttctccgcgatgctccgagatgaggtaggtggtcgcgcggttaacttgcttcctagtgaaaccgttcaggacatctacgggattgttgctaagaaagtcaacgagatttgtcaagcagacgcaatcaatgggaccgataacgaagtagttaccgtgaccgatgagaacgaaggtgaaatctctgagaaagtcaagctgggcactaaggcactggctggtcaatggctggcttacggtgttactcgcagtgtgactaagcgttcagtcatgacgctggcttacgggtccaaagagttcggcttccgtcaacaagtgctgcgccacactattcagccagctattgattccggcaagggtctgatgttcactcagccgaatcaggctgctggatacatggctaagctgatttgggaatctgtgagcgtgacggtggtagctgcggttgaagcaatgaactggcttaagtctgctgctaagctgctggctgctgaggtcaaagataagaagactggagagattcttcgcaagcgttgcgctgtgcattgggtaactcctgatggtttccctgtgtggcaggaatacaagaagcctattcagacgcgcttgaacctgatgttcctcggtcagttccgcttacagcctaccattaacaccaacaaagatagcgagattgatgcacataaacaggagtctggtatcgctcctaactttgtacacagccaagacggtagccaccttcgtaagactgtagtgtgggcacacgagaagtacggaatcgaatcttttgcactgattcacgactccttcggtaccattccggctgacgctgcgaacctgttcaaagcagtgcgcgaaactatggttgacacatatgagtcttgtgatgtactggctgatttctacgaccagttcgctgaccagttgcacgagtctcaattggacaaaatgccagcacttccggctaaaggtaacttgaacctccgtgacatcttagagtcggacttcgcgttcgcg

SEQ ID NO: 616 - protein, 890 aa, synthetic construct
  REGION 1..890: note = Variant of RNA polymerase
MHHHHHHMNTINIAKNDFSDIELAAIPFNTLADHYGEGLAREQLALEHESYEMGEARFRKMFERQLKAGEVADNAAAKPLITTLLPKMIARINDWFEEVKAKRGKRPTAFQFLQEIKPEAVAYITIKTTLACLTSADRTTVQAVASAIGRAIEDEARFGRIRDLEAKHFLKNVEEQLNKRVGHVYKKAFMQVVEADMLSKGLLGGEAWSSWHKEDSIHVGVRCIEMLIESTGMVSLHRQNAGVVGKDSETIELAPEYAEAIATRAGALAGISPMFQPCVVPPKPWTGITGGGYWANGRRPLALVRTHSKKGLMRYEDVYMPEVYKAINIAQNTAWSINKWVLAVANVITKWKHCPVEDIPAIEREELPMKPEDIDMNPEALTAWKRAKAAVYRKDKARKSRRILLEFMLEQANKFANHKAIWFPYNMDWRGRVYAVSMFNPQGNDMTKGLLTLAKGKPIGKEGYYWLKIHGANCAGVDKVPFPERIKFIEENHENIMACAKSPLENTWWAEQDSPFCFLAFCFEYAGVQHHGLSYNCSLPLAFDGSCSGIQHFSAMLRDEVGGRAVNLLPSETVQDIYGIVAKKVNEICQADAINGTDNEVVTVTDENEGEISEKVKLGTKALAGQWLAYGVTRSVTKRSVMTLAYGSKEFGFRQQVLRHTIQPAIDSGKGLMFTQPNQAAGYMAKLIWESVSVTVVAAVEAMNWLKSAAKLLAAEVKDKKTGEILRKRCAVHWVTPDGFPVWQEYKKPIQTRLNLMFLGQFRLQPTINTNKDSEIDAHKQESGIAPNFVHSQDGSHLRKTVVWAHEKYGIESFALIHDSFGTIPADAANLFKAVRETMVDTYESCDVLADFYDQFADQLHESQLDKMPALPAKGNLNLRDILESDFAFA

SEQ ID NO: 617 - DNA, 2670 bp, synthetic construct
  misc_feature 1..2670: note = Variant of RNA polymerase
  source 1..2670: mol_type = other DNA
atgcaccatcaccatcaccatatgaacacgattaacatcgctaagaacgacttctctgacatcgaactggctgctatcccgttcaacactctggctgaccattacggtgagggtttagctcgcgaacagttggcccttgagcatgagtcttacgagatgggtgaagcacgtttccgcaagatgtttgagcgtcaacttaaagctggtgaggttgcggataacgctgccgccaagcctctcatcactaccctactccctaagatgattgcacgcatcaacgactggtttgaggaagtgaaagctaagcgcggcaagcgcccgacagccttccagttcctgcaagaaatcaagccggaagccgtagcgtacatcaccattaagaccactctggcttgcctaaccagtgcggaccgtacaaccgttcaggctgtagcaagcgcaatcggtcgggccattgaggacgaggctcgcttcggtcgtatccgtgaccttgaagctaagcacttcctgaaaaacgttgaggaacaactcaacaagcgcgtagggcacgtctacaagaaagcatttatgcaagttgtcgaggctgacatgctctctaagggtctactcggtggcgaggcgtggtcttcgtggcataaggaagactctattcatgtaggagtacgctgcatcgagatgctcattgagtcaaccggaatggttagcttacaccgccaaaatgctggcgtagtaggtaaagactctgagactatcgaactcgcacctgaatacgctgaggctatcgcaacccgtgcaggtgcgctggctggcatctctccgatgttccaaccttgcgtagttcctcctaagccgtggactggcattactggtggtggctattgggctaacggtcgtcgtcctctggcgctggtgcgtactcacagtaagaaaggtctgatgcgctacgaagacgtttacatgcctgaggtgtacaaagcgattaacattgcgcaaaacaccgcctggtcgatcaacaagtgggtcctggcggtcgccaacgtaatcaccaagtggaagcattgtccggtccctgacatccctgcgattgagcgtgaagaactcccgatgaaaccggaagacatcgacatgaatcctgaggctctcaccgcgtggaaacgtgctaaagctgctgtgtaccgcaaggacaaggctcgcaagtctcgccgtatcttgcttgagttcatgcttgagcaagccaataagtttgctaaccataaggccatctggttcccttacaacatggactggcgcggtcgtgtttacgctgtgtcaatgttcaacccgcaaggtaacgatatgaccaaaggactgcttacgctggcgaaaggtaaaccaatcggtaaggaaggttactactggctgaaaatccacggtgcaaactgtgcgggtgtcgataaggttccgttccctgagcgcatcaagttcattgaggaaaaccacgagaacatcatggcttgcgctaagtctccactggagaacacttggtgggctgagcaagatagtccgttctgcttccttgcgttctgctttgagtacgctggggtacagcaccacggcctgagctataactgctcccttccgctggcgtttgacgggtcttgctctggcatccagcacttctccgcgatgctccgagatgaggtaggtggtcgcgcggttaacttgcttcctagtgaaaccgttcaggacatctacgggattgttgctaagaaagtcaacgagattctacaagcagacgcaatcaatgggaccgataacgaagtagttaccgtgaccgatgagaacgaaggtgaaatctctgagaaagtcaagctgggcactaaggcactggctggtcaatggctggcttacggtgttactcgcagtgtgactaagcgttcagtcatgacgctggcttacgggtccaaagagttcggcttccgtcaacaagtgctgcgccacactattcagccagctattgattccggcaagggtctgatgttcactcagccgaatcaggctgctggatacatggctaagctgatttgggaatctgtgagcgtgacggtggtagctgcggttgaagcaatgaactggcttaagtctgctgctaagctgctggctgctgaggtcaaagataagaagactggagagattcttcgcaagcgttgcgctgtgcattgggtaactcctgatggtttccctgtgtggcaggaatacaagaagcctattcagacgcgcttgaacctgatgttcctcggtcagttccgcttacagcctaccattaacaccaacaaagatagcgagattgatgcacataaacaggagtctggtatcgctcctaactttgtacacagccaagacggtagccaccttcgtaagactgtagtgtgggcacacgagaagtacggaatcgaatcttttgcactgattcacgactccttcggtaccattccggctgacgctgcgaacctgttcaaagcagtgcgcgaaactatggttgacacatatgagtcttgtgatgtactggctgatttctacgaccagttcgctgaccagttgcacgagtctcaattggacaaaatgccagcacttccggctaaaggtaacttgaacctccgtgacatcttagagtcggacttcgcgttcgcg

SEQ ID NO: 618 - protein, 890 aa, synthetic construct
  REGION 1..890: note = Variant of RNA polymerase
MHHHHHHMNTINIAKNDFSDIELAAIPFNTLADHYGEGLAREQLALEHESYEMGEARFRKMFERQLKAGEVADNAAAKPLITTLLPKMIARINDWFEEVKAKRGKRPTAFQFLQEIKPEAVAYITIKTTLACLTSADRTTVQAVASAIGRAIEDEARFGRIRDLEAKHFLKNVEEQLNKRVGHVYKKAFMQVVEADMLSKGLLGGEAWSSWHKEDSIHVGVRCIEMLIESTGMVSLHRQNAGVVGKDSETIELAPEYAEAIATRAGALAGISPMFQPCVVPPKPWTGITGGGYWANGRRPLALVRTHSKKGLMRYEDVYMPEVYKAINIAQNTAWSINKWVLAVANVITKWKHCPVPDIPAIEREELPMKPEDIDMNPEALTAWKRAKAAVYRKDKARKSRRILLEFMLEQANKFANHKAIWFPYNMDWRGRVYAVSMFNPQGNDMTKGLLTLAKGKPIGKEGYYWLKIHGANCAGVDKVPFPERIKFIEENHENIMACAKSPLENTWWAEQDSPFCFLAFCFEYAGVQHHGLSYNCSLPLAFDGSCSGIQHFSAMLRDEVGGRAVNLLPSETVQDIYGIVAKKVNEILQADAINGTDNEVVTVTDENEGEISEKVKLGTKALAGQWLAYGVTRSVTKRSVMTLAYGSKEFGFRQQVLRHTIQPAIDSGKGLMFTQPNQAAGYMAKLIWESVSVTVVAAVEAMNWLKSAAKLLAAEVKDKKTGEILRKRCAVHWVTPDGFPVWQEYKKPIQTRLNLMFLGQFRLQPTINTNKDSEIDAHKQESGIAPNFVHSQDGSHLRKTVVWAHEKYGIESFALIHDSFGTIPADAANLFKAVRETMVDTYESCDVLADFYDQFADQLHESQLDKMPALPAKGNLNLRDILESDFAFA

SEQ ID NO: 619 - DNA, 2670 bp, synthetic construct
  misc_feature 1..2670: note = Variant of RNA polymerase
  source 1..2670: mol_type = other DNA
atgcaccatcaccatcaccatatgaacacgattaacatcgctaagaacgacttctctgacatcgaactggctgctatcccgttcaacactctggctgaccattacggtgagggtttagctcgcgaacagttggcccttgagcatgagtcttacgagatgggtgaagcacgtttccgcaagatgtttgagcgtcaacttaaagctggtgaggttgcggataacgctgccgccaagcctctcatcactaccctactccctaagatgattgcacgcatcaacgactggtttgaggaagtgaaagctaagcgcggcaagcgcccgacagccttccagttcctgcaagaaatcaagccggaagccgtagcgtacatcaccattaagaccactctggcttgcctaaccagtgcggaccgtacaaccgttcaggctgtagcaagcgcaatcggtcgggccattgaggacgaggctcgcttcggtcgtatccgtgaccttgaagctaagcacttcctgaaaaacgttgaggaacaactcaacaagcgcgtagggcacgtctacaagaaagcatttatgcaagttgtcgaggctgacatgctctctaagggtctactcggtggcgaggcgtggtcttcgtggcataaggaagactctattcatgtaggagtacgctgcatcgagatgctcattgagtcaaccggaatggttagcttacaccgccaaaatgctggcgtagtaggtaaagactctgagactatcgaactcgcacctgaatacgctgaggctatcgcaacccgtgcaggtgcgctggctggcatctctccgatgttccaaccttgcgtagttcctcctaagccgtggactggcattactggtggtggctattgggctaacggtcgtcgtcctctggcgctggtgcgtactcacagtaagaaaggtctgatgcgctacgaagacgtttacatgcctgaggtgtacaaagcgattaacattgcgcaaaacaccgcctggtcgatcaacaagtgggtcctggcggtcgccaacgtaatcaccaagtggaagcattgtccggtcgaggacatccctgcgattgagcgtgaagaactcccgatgaaaccggaagacatcgacatgaatcctgaggctctcaccgcgtggaaacgtgctaaagctgctgtgtaccgcaaggacaaggctcgcaagtctcgccgtatcttgcttgagttcatgcttgagcaagccaataagtttgctaaccataaggccatctggttcccttacaacatggactggcgcggtcgtgtttacgctgtgtcaatgttcaacccgcaaggtaacgatatgaccaaaggactgcttacgctggcgaaaggtaaaccaatcggtaaggaaggttactactggctgaaaatccacggtgcaaactgtgcgggtgtcgataaggttccgttccctgagcgcatcaagttcattgaggaaaaccacgagaacatcatggcttgcgctaagtctccactggagaacacttggtgggctgagcaagatagtccgttctgcttccttgcgttctgctttgagtacgctggggtacagcaccacggcctgagctataactgctcccttccgctggcgtttgacgggtcttgctctggcatccagcacttctccgcgatgctccgagatgaggtaggtggtcgcgcggttaacttgcttcctagtgaaaccgttcaggacatctacgggattgttgctaagaaagtcaacgagattctacaagcagacgcaatcaatgggaccgataacgaagtagttaccgtgaccgatgagaacgaaggtgaaatctctgagaaagtccgtctgggcactaaggcactggctggtcaatggctggcttacggtgttactcgcagtgtgactaagcgttcagtcatgacgctggcttacgggtccaaagagttcggcttccgtcaacaagtgctgcgccacactattcagccagctattgattccggcaagggtctgatgttcactcagccgaatcaggctgctggatacatggctaagctgatttgggaatctgtgagcgtgacggtggtagctgcggttgaagcaatgaactggcttaagtctgctgctaagctgctggctgctgaggtcaaagataagaagactggagagattcttcgcaagcgttgcgctgtgcattgggtaactcctgatggtttccctgtgtggcaggaatacaagaagcctattcagacgcgcttgaacctgatgttcctcggtcagttccgcttacagcctaccattaacaccaacaaagatagcgagattgatgcacataaacaggagtctggtatcgctcctaactttgtacacagccaagacggtagccaccttcgtaagactgtagtgtgggcacacgagaagtacggaatcgaatcttttgcactgattcacgactccttcggtaccattccggctgacgctgcgaacctgttcaaagcagtgcgcgaaactatggttgacacatatgagtcttgtgatgtactggctgatttctacgaccagttcgctgaccagttgcacgagtctcaattggacaaaatgccagcacttccggctaaaggtaacttgaacctccgtgacatcttagagtcggacttcgcgttcgcg

SEQ ID NO: 620 - protein, 890 aa, synthetic construct
  REGION 1..890: note = Variant of RNA polymerase
MHHHHHHMNTINIAKNDFSDIELAAIPFNTLADHYGEGLAREQLALEHESYEMGEARFRKMFERQLKAGEVADNAAAKPLITTLLPKMIARINDWFEEVKAKRGKRPTAFQFLQEIKPEAVAYITIKTTLACLTSADRTTVQAVASAIGRAIEDEARFGRIRDLEAKHFLKNVEEQLNKRVGHVYKKAFMQVVEADMLSKGLLGGEAWSSWHKEDSIHVGVRCIEMLIESTGMVSLHRQNAGVVGKDSETIELAPEYAEAIATRAGALAGISPMFQPCVVPPKPWTGITGGGYWANGRRPLALVRTHSKKGLMRYEDVYMPEVYKAINIAQNTAWSINKWVLAVANVITKWKHCPVEDIPAIEREELPMKPEDIDMNPEALTAWKRAKAAVYRKDKARKSRRILLEFMLEQANKFANHKAIWFPYNMDWRGRVYAVSMFNPQGNDMTKGLLTLAKGKPIGKEGYYWLKIHGANCAGVDKVPFPERIKFIEENHENIMACAKSPLENTWWAEQDSPFCFLAFCFEYAGVQHHGLSYNCSLPLAFDGSCSGIQHFSAMLRDEVGGRAVNLLPSETVQDIYGIVAKKVNEILQADAINGTDNEVVTVTDENEGEISEKVRLGTKALAGQWLAYGVTRSVTKRSVMTLAYGSKEFGFRQQVLRHTIQPAIDSGKGLMFTQPNQAAGYMAKLIWESVSVTVVAAVEAMNWLKSAAKLLAAEVKDKKTGEILRKRCAVHWVTPDGFPVWQEYKKPIQTRLNLMFLGQFRLQPTINTNKDSEIDAHKQESGIAPNFVHSQDGSHLRKTVVWAHEKYGIESFALIHDSFGTIPADAANLFKAVRETMVDTYESCDVLADFYDQFADQLHESQLDKMPALPAKGNLNLRDILESDFAFA

SEQ ID NO: 621 - DNA, 2670 bp, synthetic construct
  misc_feature 1..2670: note = Variant of RNA polymerase
  source 1..2670: mol_type = other DNA
atgcaccatcaccatcaccatatgaacacgattaacatcgctaagaacgacttctctgacatcgaactggctgctatcccgttcaacactctggctgaccattacggtgagggtttagctcgcgaacagttggcccttgagcatgagtcttacgagatgggtgaagcacgtttccgcaagatgtttgagcgtcaacttaaagctggtgaggttgcggataacgctgccgccaagcctctcatcactaccctactccctaagatgattgcacgcatcaacgactggtttgaggaagtgaaagctaagcgcggcaagcgcccgacagccttccagttcctgcaagaaatcaagccggaagccgtagcgtacatcaccattaagaccactctggcttgcctaaccagtgcggaccgtacaaccgttcaggctgtagcaagcgcaatcggtcgggccattgaggacgaggctcgcttcggtcgtatccgtgaccttgaagctaagcacttcctgaaaggggttgaggaacaactcaacaagcgcgtagggcacgtctacaagaaagcatttatgcaagttgtcgaggctgacatgctctctaagggtctactcggtggcgaggcgtggtcttcgtggcataaggaagactctattcatgtaggagtacgctgcatcgagatgctcattgagtcaaccggaatggttagcttacaccgccaaaatgctggcgtagtaggtaaagactctgagactatcgaactcgcacctgaatacgctgaggctatcgcaacccgtgcaggtgcgctggctggcatctctccgatgttccaaccttgcgtagttcctcctaagccgtggactggcattactggtggtggctattgggctaacggtcgtcgtcctctggcgctggtgcgtactcacagtaagaaaggtctgatgcgctacgaagacgtttacatgcctgaggtgtacaaagcgattaacattgcgcaaaacaccgcctggtcgatcaacaagtgggtcctggcggtcgccaacgtaatcaccaagtggaagcattgtccggtcgaggacatccctgcgattgagcgtgaagaactcccgatgaaaccggaagacatcgacatgaatcctgaggctctcaccgcgtggaaacgtgctaaagctgctgtgtaccgcaaggacaaggctcgcaagtctcgccgtatcttgcttgagttcatgcttgagcaagccaataagtttgctaaccataaggccatctggttcccttacaacatggactggcgcggtcgtgtttacgctgtgtcaatgttcaacccgcaaggtaacgatatgaccaaaggactgcttacgctggcgaaaggtaaaccaatcggtaaggaaggttactactggctgaaaatccacggtgcaaactgtgcgggtgtcgataaggttccgttccctgagcgcatcaagttcattgaggaaaaccacgagaacatcatggcttgcgctaagtctccactggagaacacttggtgggctgagcaagatagtccgttctgcttccttgcgttctgctttgagtacgctggggtacagcaccacggcctgagctataactgctcccttccgctggcgtttgacgggtcttgctctggcatccagcacttctccgcgatgctccgagatgaggtaggtggtcgcgcggttaacttgcttcctagtgaaaccgttcaggacatctacgggattgttgctaagaaagtcaacgagattctacaagcagacgcaatcaatgggaccgataacgaagtagttaccgtgaccgatgagaacgaaggtgaaatctctgagaaagtcaagctgggcactaaggcactggctggtcaatggctggcttacggtgttactcgcagtgtgactaagcgttcagtcatgacgctggcttacgggtccaaagagttcggcttccgtcaacaagtgctgcgccacactattcagccagctattgattccggcaagggtctgatgttcactcagccgaatcaggctgctggatacatggctaagctgatttgggaatctgtgagcgtgacggtggtagctgcggttgaagcaatgaactggcttaagtctgctgctaagctgctggctgctgaggtcaaagataagaagactggagagattcttcgcaagcgttgcgctgtgcattgggtaactcctgatggtttccctgtgtggcaggaatacaagaagcctattcagacgcgcttgaacctgatgttcctcggtcagttccgcttacagcctaccattaacaccaacaaagatagcgagattgatgcacataaacaggagtctggtatcgctcctaactttgtacacagccaagacggtagccaccttcgtaagactgtagtgtgggcacacgagaagtacggaatcgaatcttttgcactgattcacgactccttcggtaccattccggctgacgctgcgaacctgttcaaagcagtgcgcgaaactatggttgacacatatgagtcttgtgatgtactggctgatttctacgaccagttcgctgaccagttgcacgagtctcaattggacaaaatgccagcacttccggctaaaggtaacttgaacctccgtgacatcttagagtcggacttcgcgttcgcg

SEQ ID NO: 622 - protein, 890 aa, synthetic construct
  REGION 1..890: note = Variant of RNA polymerase
MHHHHHHMNTINIAKNDFSDIELAAIPFNTLADHYGEGLAREQLALEHESYEMGEARFRKMFERQLKAGEVADNAAAKPLITTLLPKMIARINDWFEEVKAKRGKRPTAFQFLQEIKPEAVAYITIKTTLACLTSADRTTVQAVASAIGRAIEDEARFGRIRDLEAKHFLKGVEEQLNKRVGHVYKKAFMQVVEADMLSKGLLGGEAWSSWHKEDSIHVGVRCIEMLIESTGMVSLHRQNAGVVGKDSETIELAPEYAEAIATRAGALAGISPMFQPCVVPPKPWTGITGGGYWANGRRPLALVRTHSKKGLMRYEDVYMPEVYKAINIAQNTAWSINKWVLAVANVITKWKHCPVEDIPAIEREELPMKPEDIDMNPEALTAWKRAKAAVYRKDKARKSRRILLEFMLEQANKFANHKAIWFPYNMDWRGRVYAVSMFNPQGNDMTKGLLTLAKGKPIGKEGYYWLKIHGANCAGVDKVPFPERIKFIEENHENIMACAKSPLENTWWAEQDSPFCFLAFCFEYAGVQHHGLSYNCSLPLAFDGSCSGIQHFSAMLRDEVGGRAVNLLPSETVQDIYGIVAKKVNEILQADAINGTDNEVVTVTDENEGEISEKVKLGTKALAGQWLAYGVTRSVTKRSVMTLAYGSKEFGFRQQVLRHTIQPAIDSGKGLMFTQPNQAAGYMAKLIWESVSVTVVAAVEAMNWLKSAAKLLAAEVKDKKTGEILRKRCAVHWVTPDGFPVWQEYKKPIQTRLNLMFLGQFRLQPTINTNKDSEIDAHKQESGIAPNFVHSQDGSHLRKTVVWAHEKYGIESFALIHDSFGTIPADAANLFKAVRETMVDTYESCDVLADFYDQFADQLHESQLDKMPALPAKGNLNLRDILESDFAFA

SEQ ID NO: 623 - DNA, 2670 bp, synthetic construct
  misc_feature 1..2670: note = Variant of RNA polymerase
  source 1..2670: mol_type = other DNA
atgcaccatcaccatcaccatatgaacacgattaacatcgctaagaacgacttctctgacatcgaactggctgctatcccgttcaacactctggctgaccattacggtgagggtttagctcgcgaacagttggcccttgagcatgagtcttacgagatgggtgaagcacgtttccgcaagatgtttgagcgtcaacttaaagctggtgaggttgcggataacgctgccgccaagcctctcatcactaccctactccctaagatgattgcacgcatcaacgactggtttgaggaagtgaaagctaagcgcggcaagcgcccgacagccttccagttcctgcaagaaatcaagccggaagccgtagcgtacatcaccattaagaccactctggcttgcctaaccagtgcggaccgtacaaccgttcaggctgtagcaagcgcaatcggtcgggccattgaggacgaggctcgcttcggtcgtatccgtgaccttgaagctaagcacttcctgaaaaacgttgaggaacaactcaacaagcgcgtagggcacgtctacaagaaagcatttatgcaagttgtcgaggctgacatgctctctaagggtctactcggtggcgaggcgtggtcttcgtggcataaggaagactctattcatgtaggagtacgctgcatcgagatgctcattgagtcaaccggaatggttagcttacaccgccaaaatgctggcgtagtaggtaaagactctgagactatcgaactcgcacctgaatacgctgaggctatcgcaacccgtgcaggtgcgctggctggcatctctccgatgttccaaccttgcgtagttcctcctaagccgtggactggcattactggtggtggctattgggctaacggtcgtcgtcctctggcgctggtgcgtactcacagtaagaaaggtctgatgcgctacgaagacgtttacatgcctgaggtgtacaaagcgattaacattgcgcaaaacaccgcctggtcgatcaacaagtgggtcctggcggtcgccaacgtaatcaccaagtggaagcattgtccggtcgaggacatccctgcgattgagcgtgaagaactcccgatgaaaccggaagacatcgacatgaatcctgaggctctcaccgcgtggaaacgtgctaaagctgctgtgtaccgcaaggacaaggctcgcaagtctcgccgtatcttgcttgagttcatgcttgagcaagccaataagtttgctaaccataaggccatctggttcccttacaacatggactggcgcggtcgtgtttacgctgtgtcaatgttcaacccgcaaggtaacgatatgaccaaaggactgcttacgctggcgaaaggtaaaccaatcggtaaggaaggttactactggctgaaaatccacggtgcaaactgtgcgggtgtcgataaggttccgttccctgagcgcatcaagttcattgaggaaaaccacgagaacatcatggcttgcgctaagtctccactggagaacacttggtgggctgagcaagatagtccgttctgcttccttgcgttctgctttgagtacgctggggtacagcaccacggcctgagctataactgctcccttccgctggcgtttgacgggtcttgctctggcatccagcacttctccgcgatgctccgagatgaggtaggtggtcgcgcggttaacttgcttcctagtgaaaccgttcaggacatctacgggattgttgctaagaaagtcaacgagattctacaagcagacgcaatcaatgggaccgcgaacgaagtagttaccgtgaccgatgagaacgaaggtgaaatctctgagaaagtcaagctgggcactaaggcactggctggtcaatggctggcttacggtgttactcgcagtgtgactaagcgttcagtcatgacgctggcttacgggtccaaagagttcggcttccgtcaacaagtgctgcgccacactattcagccagctattgattccggcaagggtctgatgttcactcagccgaatcaggctgctggatacatggctaagctgatttgggaatctgtgagcgtgacggtggtagctgcggttgaagcaatgaactggcttaagtctgctgctaagctgctggctgctgaggtcaaagataagaagactggagagattcttcgcaagcgttgcgctgtgcattgggtaactcctgatggtttccctgtgtggcaggaatacaagaagcctattcagacgcgcttgaacctgatgttcctcggtcagttccgcttacagcctaccattaacaccaacaaagatagcgagattgatgcacataaacaggagtctggtatcgctcctaactttgtacacagccaagacggtagccaccttcgtaagactgtagtgtgggcacacgagaagtacggaatcgaatcttttgcactgattcacgactccttcggtaccattccggctgacgctgcgaacctgttcaaagcagtgcgcgaaactatggttgacacatatgagtcttgtgatgtactggctgatttctacgaccagttcgctgaccagttgcacgagtctcaattggacaaaatgccagcacttccggctaaaggtaacttgaacctccgtgacatcttagagtcggacttcgcgttcgcg

SEQ ID NO: 624 - protein, 890 aa, synthetic construct
  REGION 1..890: note = Variant of RNA polymerase
MHHHHHHMNTINIAKNDFSDIELAAIPFNTLADHYGEGLAREQLALEHESYEMGEARFRKMFERQLKAGEVADNAAAKPLITTLLPKMIARINDWFEEVKAKRGKRPTAFQFLQEIKPEAVAYITIKTTLACLTSADRTTVQAVASAIGRAIEDEARFGRIRDLEAKHFLKNVEEQLNKRVGHVYKKAFMQVVEADMLSKGLLGGEAWSSWHKEDSIHVGVRCIEMLIESTGMVSLHRQNAGVVGKDSETIELAPEYAEAIATRAGALAGISPMFQPCVVPPKPWTGITGGGYWANGRRPLALVRTHSKKGLMRYEDVYMPEVYKAINIAQNTAWSINKWVLAVANVITKWKHCPVEDIPAIEREELPMKPEDIDMNPEALTAWKRAKAAVYRKDKARKSRRILLEFMLEQANKFANHKAIWFPYNMDWRGRVYAVSMFNPQGNDMTKGLLTLAKGKPIGKEGYYWLKIHGANCAGVDKVPFPERIKFIEENHENIMACAKSPLENTWWAEQDSPFCFLAFCFEYAGVQHHGLSYNCSLPLAFDGSCSGIQHFSAMLRDEVGGRAVNLLPSETVQDIYGIVAKKVNEILQADAINGTANEVVTVTDENEGEISEKVKLGTKALAGQWLAYGVTRSVTKRSVMTLAYGSKEFGFRQQVLRHTIQPAIDSGKGLMFTQPNQAAGYMAKLIWESVSVTVVAAVEAMNWLKSAAKLLAAEVKDKKTGEILRKRCAVHWVTPDGFPVWQEYKKPIQTRLNLMFLGQFRLQPTINTNKDSEIDAHKQESGIAPNFVHSQDGSHLRKTVVWAHEKYGIESFALIHDSFGTIPADAANLFKAVRETMVDTYESCDVLADFYDQFADQLHESQLDKMPALPAKGNLNLRDILESDFAFA

SEQ ID NO: 625 - DNA, 2670 bp, synthetic construct
  misc_feature 1..2670: note = Variant of RNA polymerase
  source 1..2670: mol_type = other DNA
atgcaccatcaccatcaccatatgaacacgattaacatcgctaagaacgacttctctgacatcgaactggctgctatcccgttcaacactctggctgaccattacggtgagggtttagctcgcgaacagttggcccttgagcatgagtcttacgagatgggtgaaggtcgtttccgcaagatgtttgagcgtcaacttaaagctggtgaggttgcggataacgctgccgccaagcctctcatcactaccctactccctaagatgattgcacgcatcaacgactggtttgaggaagtgaaagctaagcgcggcaagcgcccgacagccttccagttcctgcaagaaatcaagccggaagccgtagcgtacatcaccattaagaccactctggcttgcctaaccagtgcggaccgtacaaccgttcaggctgtagcaagcgcaatcggtcgggccattgaggacgaggctcgcttcggtcgtatccgtgaccttgaagctaagcacttcctgaaaaacgttgaggaacaactcaacaagcgcgtagggcacgtctacaagaaagcatttatgcaagttggcgaggctgacatgctctctaagggtctactcggtggcgaggcgtggtcttcgtggcataaggaagactctattcatgtaggagtacgctgcatcgagatgctcattgagtcaaccggaatggttagcttacaccgccaaaatgctggcgtagtaggtaaagactctgagactatcgaactcgcacctgaatacgctgaggctatcgcaacccgtgcaggtgcgctggctggcatctctccgatgttccaaccttgcgtagttcctcctaagccgtggactggcattactggtggtggctattgggctaacggtcgtcgtcctctggcgctggtgcgtactcacagtaagaaaggtctgatgcgctacgaagacgtttacatgcctgaggtgtacaaagcgattaacattgcgcaaaacaccgcctggtcgatcaacaagtgggtcctggcggtcgccaacgtaatcaccaagtggaagcattgtccggtcgaggacatccctgcgattgagcgtgaagaactcccgatgaaaccggaagacatcgacatgaatcctgaggctctcaccgcgtggaaacgtgctaaagctgctgtgtaccgcaaggacaaggctcgcaagtctcgccgtatcttgcttgagttcatgcttgagcaagccaataagtttgctaaccataaggccatctggttcccttacaacatggactggcgcggtcgtgtttacgctgtgtcaatgttcaacccgcaaggtaacgatatgaccaaaggactgcttacgctggcgaaaggtaaaccaatcggtaaggaaggttactactggctgaaaatccacggtgcaaactgtgcgggtgtcgataaggttccgttccctgagcgcatcaagttcattgaggaaaaccacgagaacatcatggcttgcgctaagtctccactggagaacacttggtgggctgagcaagatagtccgttctgcttccttgcgttctgctttgagtacgctggggtacagcaccacggcctgagctataactgctcccttccgctggcgtttgacgggtcttgctctggcatccagcacttctccgcgatgctccgagatgaggtaggtggtcgcgcggttaacttgcttcctagtgaaaccgttcaggacatctacgggattgttgctaagaaagtcaacgagattctacaagcagacgcaatcaatgggaccgataacgaagtagttaccgtgaccgatgagaacgaaggtgaaatctctgagaaagtcaagctgggcactaaggcactggctggtcaatggctggcttacggtgttactcgcagtgtgactaagcgttcagtcatgacgctggcttacgggtccaaagagttcggcttccgtcaacaagtgctgcgccacactattcagccagctattgattccggcaagggtctgatgttcactcagccgaatcaggctgctggatacatggctaagctgatttgggaatctgtgagcgtgacggtggtagctgcggttgaagcaatgaactggcttaagtctgctgctaagctgctggctgctgaggtcaaagataagaagactggagagattcttcgcaagcgttgcgctgtgcattgggtaactcctgatggtttccctgtgtggcaggaatacaagaagcctattcagacgcgcttgaacctgatgttcctcggtcagttccgcttacagcctaccattaacaccaacaaagatagcgagattgatgcacataaacaggagtctggtatcgctcctaactttgtacacagccaagacggtagccaccttcgtaagactgtagtgtgggcacacgagaagtacggaatcgaatcttttgcactgattcacgactccttcggtaccattccggctgacgctgcgaacctgttcaaagcagtgcgcgaaactatggttgacacatatgagtcttgtgatgtactggctgatttctacgaccagttcgctgaccagttgcacgagtctcaattggacaaaatgccagcacttccggctaaaggtaacttgaacctccgtgacatcttagagtcggacttcgcgttcgcg

SEQ ID NO: 626 - protein, 890 aa, synthetic construct
  REGION 1..890: note = Variant of RNA polymerase
MHHHHHHMNTINIAKNDFSDIELAAIPFNTLADHYGEGLAREQLALEHESYEMGEGRFRKMFERQLKAGEVADNAAAKPLITTLLPKMIARINDWFEEVKAKRGKRPTAFQFLQEIKPEAVAYITIKTTLACLTSADRTTVQAVASAIGRAIEDEARFGRIRDLEAKHFLKNVEEQLNKRVGHVYKKAFMQVGEADMLSKGLLGGEAWSSWHKEDSIHVGVRCIEMLIESTGMVSLHRQNAGVVGKDSETIELAPEYAEAIATRAGALAGISPMFQPCVVPPKPWTGITGGGYWANGRRPLALVRTHSKKGLMRYEDVYMPEVYKAINIAQNTAWSINKWVLAVANVITKWKHCPVEDIPAIEREELPMKPEDIDMNPEALTAWKRAKAAVYRKDKARKSRRILLEFMLEQANKFANHKAIWFPYNMDWRGRVYAVSMFNPQGNDMTKGLLTLAKGKPIGKEGYYWLKIHGANCAGVDKVPFPERIKFIEENHENIMACAKSPLENTWWAEQDSPFCFLAFCFEYAGVQHHGLSYNCSLPLAFDGSCSGIQHFSAMLRDEVGGRAVNLLPSETVQDIYGIVAKKVNEILQADAINGTDNEVVTVTDENEGEISEKVKLGTKALAGQWLAYGVTRSVTKRSVMTLAYGSKEFGFRQQVLRHTIQPAIDSGKGLMFTQPNQAAGYMAKLIWESVSVTVVAAVEAMNWLKSAAKLLAAEVKDKKTGEILRKRCAVHWVTPDGFPVWQEYKKPIQTRLNLMFLGQFRLQPTINTNKDSEIDAHKQESGIAPNFVHSQDGSHLRKTVVWAHEKYGIESFALIHDSFGTIPADAANLFKAVRETMVDTYESCDVLADFYDQFADQLHESQLDKMPALPAKGNLNLRDILESDFAFA

SEQ ID NO: 627 - DNA, 2670 bp, synthetic construct
  misc_feature 1..2670: note = Variant of RNA polymerase
  source 1..2670: mol_type = other DNA
atgcaccatcaccatcaccatatgaacacgattaacatcgctaagaacgacttctctgacatcgaactggctgctatcccgttcaacactctggctgaccattacggtgagggtttagctcgcgaacagttggcccttgagcatgagtcttacgagatgggtgaaactcgtttccgcaagatgtttgagcgtcaacttaaagctggtgaggttgcggataacgctgccgccaagcctctcatcactaccctactccctaagatgattgcacgcatcaacgactggtttgaggaagtgaaagctaagcgcggcaagcgcccgacagccttccagttcctgcaagaaatcaagccggaagccgtagcgtacatcaccattaagaccactctggcttgcctaaccagtgcggaccgtacaaccgttcaggctgtagcaagcgcaatcggtcgggccattgaggacgaggctcgcttcggtcgtatccgtgaccttgaagctaagcacttcctgaaaaacgttgaggaacaactcaacaagcgcgtagggcacgtctacaagaaagcatttatgcaagttgtcgaggctgacatgctctctaagggtctactcggtggcgaggcgtggtcttcgtggcataaggaagactctattcatgtaggagtacgctgcatcgagatgctcattgagtcaaccggaatggttagcttacaccgccaaaatgctggcgtagtaggtaaagactctgagactatcgaactcgcacctgaatacgctgaggctatcgcaacccgtgcaggtgcgctggctggcatctctccgatgttccaaccttgcgtagttcctcctaagccgtggactggcattactggtggtggctattgggctaacggtcgtcgtcctctggcgctggtgcgtactcacagtaagaaaggtctgatgcgctacgaagacgtttacatgcctgaggtgtacaaagcgattaacattgcgcaaaacaccgcctggtcgatcaacaagtgggtcctggcggtcgccaacgtaatcaccaagtggaagcattgtccggtcgaggacatccctgcgattgagcgtgaagaactcccgatgaaaccggaagacatcgacatgaatcctgaggctctcaccgcgtggaaacgtgctaaagctgctgtgtaccgcaaggacaaggctcgcaagtctcgccgtatcttgcttgagttcatgcttgagcaagccaataagtttgctaaccataaggccatctggttcccttacaacatggactggcgcggtcgtgtttacgctgtgtcaatgttcaacccgcaaggtaacgatatgaccaaaggactgcttacgctggcgaaaggtaaaccaatcggtaaggaaggttactactggctgaaaatccacggtgcaaactgtgcgggtgtcgataaggttccgttccctgagcgcatcaagttcattgaggaaaaccacgagaacatcatggcttgcgctaagtctccactggagaacacttggtgggctgagcaagatagtccgttctgcttccttgcgttctgctttgagtacgctggggtacagcaccacggcctgagctataactgctcccttccgctggcgtttgacgggtcttgctctggcatccagcacttctccgcgatgctccgagatgaggtaggtggtcgcgcggttaacttgcttcctagtgaaaccgttcaggacatctacgggattgttgctaagaaagtcaacgagattctacaagcagacgcaatcaatgggaccgataacgaagtagttaccgtgaccgatgagaacgaaggtgaaatctctgagaaagtcaagctgggcactaaggcactggctggtcaatggctggcttacggtgttactcgcagtgtgactaagcgttcagtcatgacgctggcttacgggtccaaagagttcggcttccgtcaacaagtgctgcgccacactattcagccagctattgattccggcaagggtctgatgttcactcagccgaatcaggctgctggatacatggctaagctgatttgggaatctgtgagcgtgacggtggtagctgcggttgaagcaatgaactggcttaagtctgctgctaagctgctggctgctgaggtcaaagataagaagactggagagattcttcgcaagcgttgcgctgtgcattgggtaactcctgatggtttccctgtgtggcaggaatacaagaagcctattcagacgcgcttgaacctgatgttcctcggtcagttccgcttacagcctaccattaacaccaacaaagatagcgagattgatgcacataaacaggagtctggtatcgctcctaactttgtacacagccaagacggtagccaccttcgtaagactgtagtgtgggcacacgagaagtacggaatcgaatcttttgcactgattcacgactccttcggtaccattccggctgacgctgcgaacctgttcaaagcagtgcgcgaaactatggttgacacatatgagtcttgtgatgtactggctgatttctacgaccagttcgctgaccagttgcacgagtctcaattggacaaaatgccagcacttccggctaaaggtaacttgaacctccgtgacatcttagagtcggacttcgcgttcgcg

SEQ ID NO: 628 - protein, 890 aa, synthetic construct
  REGION 1..890: note = Variant of RNA polymerase
MHHHHHHMNTINIAKNDFSDIELAAIPFNTLADHYGEGLAREQLALEHESYEMGETRFRKMFERQLKAGEVADNAAAKPLITTLLPKMIARINDWFEEVKAKRGKRPTAFQFLQEIKPEAVAYITIKTTLACLTSADRTTVQAVASAIGRAIEDEARFGRIRDLEAKHFLKNVEEQLNKRVGHVYKKAFMQVVEADMLSKGLLGGEAWSSWHKEDSIHVGVRCIEMLIESTGMVSLHRQNAGVVGKDSETIELAPEYAEAIATRAGALAGISPMFQPCVVPPKPWTGITGGGYWANGRRPLALVRTHSKKGLMRYEDVYMPEVYKAINIAQNTAWSINKWVLAVANVITKWKHCPVEDIPAIEREELPMKPEDIDMNPEALTAWKRAKAAVYRKDKARKSRRILLEFMLEQANKFANHKAIWFPYNMDWRGRVYAVSMFNPQGNDMTKGLLTLAKGKPIGKEGYYWLKIHGANCAGVDKVPFPERIKFIEENHENIMACAKSPLENTWWAEQDSPFCFLAFCFEYAGVQHHGLSYNCSLPLAFDGSCSGIQHFSAMLRDEVGGRAVNLLPSETVQDIYGIVAKKVNEILQADAINGTDNEVVTVTDENEGEISEKVKLGTKALAGQWLAYGVTRSVTKRSVMTLAYGSKEFGFRQQVLRHTIQPAIDSGKGLMFTQPNQAAGYMAKLIWESVSVTVVAAVEAMNWLKSAAKLLAAEVKDKKTGEILRKRCAVHWVTPDGFPVWQEYKKPIQTRLNLMFLGQFRLQPTINTNKDSEIDAHKQESGIAPNFVHSQDGSHLRKTVVWAHEKYGIESFALIHDSFGTIPADAANLFKAVRETMVDTYESCDVLADFYDQFADQLHESQLDKMPALPAKGNLNLRDILESDFAFA

SEQ ID NO: 629 - DNA, 2670 bp, synthetic construct
  misc_feature 1..2670: note = Variant of RNA polymerase
  source 1..2670: mol_type = other DNA
atgcaccatcaccatcaccatatgaacacgattaacatcgctaagaacgacttctctgacatcgaactggctgctatcccgttcaacactctggctgaccattacggtgagggtttagctcgcgaacagttggcccttgagcatgagtcttacgagatgggtgaagcacgtttccgcaagatgtttgagcgtcaacttaaagctggtgaggttgcggataacgctgccgccaagcctctcatcactaccctactccctaagatgattgcacgcatcaacgactggtttgaggaagtgaaagctaagcgcggcaagcgcccgacagccttccagttcctgcaagaaatcaagccggaagccgtagcgtacatcaccattaagaccactctggcttgcctaaccagtgcggaccgtacaaccgttcaggctgtagcaagcgcaatcggtcgggccattgaggacgaggctcgcttcggtcgtatccgtgaccttgaagctaagcacttcctgaaaaacgttgaggaacaactcaacaagcgcgtagggcacgtctacaagaaagcatttatgcaagttgtcgaggctgacatgctctctaagggtctactcggtggcgaggcgtggtcttcgtggcataaggaagactctattcatgtaggagtacgctgcatcgagatgctcattgagtcaaccggaatggttagcttacaccgccaaaatgctggcgtagtaggtaaagactctgagactatcgaactcgcacctgaatacgctgaggctatcgcaacccgtgcaggtgcgctggctggcatctctccgatgttccaaccttgcgtagttcctcctaagccgtggactggcattactggtggtggctattgggctaacggtcgtcgtcctctggcgctggtgcgtactcacagtaagaaaggtctgatgcgctacgaagacgtttacatgcctgaggtgtacaaagcgattaacattgcgcaaaacaccgcctggtcgatcaacaagtgggtcctggcggtcgccaacgtaatcaccaagtggaagcattgtccggtcgaggacatccctgcgattgagcgtgaagaactcccgatgaaaccggaagacatcgacatgaatcctgaggctctcaccgcgtggaaacgtgctaaagctgctgtgtaccgcaaggacaaggctcgcaagtctcgccgtatcttgcttgagttcatgcttgagcaagccaataagtttgctaaccataaggccatctggttcccttacaacatggactggcgcggtcgtgtttacgctgtgtcaatgttcaacccgcaaggtaacgatatgaccaaaggactgcttacgctggcgaaaggtaaaccaatcggtaaggaaggttactactggctgaaaatccacggtgcaaactgtgcgggtgtcgataaggttccgttccctgagcgcatcaagttcattgaggaaaaccacgagaacatcatggcttgcgctaagtctccactggagaacacttggtgggctgagcaagatagtccgttctgcttccttgcgttctgctttgagtacgctggggtacagcaccacggcctgagctatgtgtgctcccttccgctggcgtttgacgggtcttgctctggcatccagcacttctccgcgatgctccgagatgaggtaggtggtcgcgcggttaacttgcttcctagtgaaaccgttcaggacatctacgggattgttgctaagaaagtcaacgagattctacaagcagacgcaatcaatgggaccgataacgaagtagttaccgtgaccgatgagaacgaaggtgaaatctctgagaaagtcaagctgggcactaaggcactggctggtcaatggctggcttacggtgttactcgcagtgtgactaagcgttcagtcatgacgctggcttacgggtccaaagagttcggcttccgtcaacaagtgctgcgccacactattcagccagctattgattccggcaagggtctgatgttcactcagccgaatcaggctgctggatacatggctaagctgatttgggaatctgtgagcgtgacggtggtagctgcggttgaagcaatgaactggcttaagtctgctgctaagctgcttgctgctgaggtcaaagataagaagactggagagattcttcgcaagcgttgcgctgtgcattgggtaactcctgatggtttccctgtgtggcaggaatacaagaagcctattcagacgcgcttgaacctgatgttcctcggtcagttccgcttacagcctaccattaacaccaacaaagatagcgagattgatgcacataaacaggagtctggtatcgctcctaactttgtacacagccaagacggtagccaccttcgtaagactgtagtgtgggcacacgagaagtacggaatcgaatcttttgcactgattcacgactccttcggtaccattccggctgacgctgcgaacctgttcaaagcagtgcgcgaaactatggttgacacatatgagtcttgtgatgtactggctgatttctacgaccagttcgctgaccagttgcacgagtctcaattggacaaaatgccagcacttccggctaaaggtaacttgaacctccgtgacatcttagagtcggacttcgcgttcgcg

SEQ ID NO: 630 - protein, 890 aa, synthetic construct
  REGION 1..890: note = Variant of RNA polymerase
MHHHHHHMNTINIAKNDFSDIELAAIPFNTLADHYGEGLAREQLALEHESYEMGEARFRKMFERQLKAGEVADNAAAKPLITTLLPKMIARINDWFEEVKAKRGKRPTAFQFLQEIKPEAVAYITIKTTLACLTSADRTTVQAVASAIGRAIEDEARFGRIRDLEAKHFLKNVEEQLNKRVGHVYKKAFMQVVEADMLSKGLLGGEAWSSWHKEDSIHVGVRCIEMLIESTGMVSLHRQNAGVVGKDSETIELAPEYAEAIATRAGALAGISPMFQPCVVPPKPWTGITGGGYWANGRRPLALVRTHSKKGLMRYEDVYMPEVYKAINIAQNTAWSINKWVLAVANVITKWKHCPVEDIPAIEREELPMKPEDIDMNPEALTAWKRAKAAVYRKDKARKSRRILLEFMLEQANKFANHKAIWFPYNMDWRGRVYAVSMFNPQGNDMTKGLLTLAKGKPIGKEGYYWLKIHGANCAGVDKVPFPERIKFIEENHENIMACAKSPLENTWWAEQDSPFCFLAFCFEYAGVQHHGLSYVCSLPLAFDGSCSGIQHFSAMLRDEVGGRAVNLLPSETVQDIYGIVAKKVNEILQADAINGTDNEVVTVTDENEGEISEKVKLGTKALAGQWLAYGVTRSVTKRSVMTLAYGSKEFGFRQQVLRHTIQPAIDSGKGLMFTQPNQAAGYMAKLIWESVSVTVVAAVEAMNWLKSAAKLLAAEVKDKKTGEILRKRCAVHWVTPDGFPVWQEYKKPIQTRLNLMFLGQFRLQPTINTNKDSEIDAHKQESGIAPNFVHSQDGSHLRKTVVWAHEKYGIESFALIHDSFGTIPADAANLFKAVRETMVDTYESCDVLADFYDQFADQLHESQLDKMPALPAKGNLNLRDILESDFAFA

SEQ ID NO: 631 - DNA, 2670 bp, synthetic construct
  misc_feature 1..2670: note = Variant of RNA polymerase
  source 1..2670: mol_type = other DNA
atgcaccatcaccatcaccatatgaacacgattaacatcgctaagaacgacttctctgacatcgaactggctgctatcccgttcaacactctggctgaccattacggtgagggtttagctcgcgaacagttggcccttgagcatgagtcttacacgatgggtgaagcacgtttccgcaagatgtttgagcgtcaacttaaagctggtgaggttgcggataacgctgccgccaagcctctcatcactaccctactccctaagatgattgcacgcatcaacgactggtttgaggaagtgaaagctaagcgcggcaagcgcccgacagccttccagttcctgcaagaaatcaagccggaagccgtagcgtacatcaccattaagaccactctggcttgcctaaccagtgcggaccgtacaaccgttcaggctgtagcaagcgcaatcggtcgggccattgaggacgaggctcgcttcggtcgtatccgtgaccttgaagctaagcacttcctgaaaaacgttgaggaacaactcaacaagcgcgtagggcacgtctacaagaaagcatttatgcaagttgtcgaggctgacatgctctctaagggtctactcggtggcgaggcgtggtcttcgtggcataaggaagactctattcatgtaggagtacgctgcatcgagatgctcattgagtcaaccggaatggttagcttacaccgccaaaatgctggcgtagtaggtaaagactctgagactatcgaactcgcacctgaatacgctgaggctatcgcaacccgtgcaggtgcgctggctggcatctctccgatgttccaaccttgcgtagttcctcctaagccgtggactggcattactggtggtggctattgggctaacggtcgtcgtcctctggcgctggtgcgtactcacagtaagaaaggtctgatgcgctacgaagacgtttacatgcctgaggtgtacaaagcgattaacattgcgcaaaacaccgcctggtcgatcaacaagtgggtcctggcggtcgccaacgtaatcaccaagtggaagcattgtccggtcgaggacatccctgcgattgagcgtgaagaactcccgatgaaaccggaagacatcgacatgaatcctgaggctctcaccgcgtggaaacgtgctaaagctgctgtgtaccgcaaggacaaggctcgcaagtctcgccgtatcttgcttgagttcatgcttgagcaagccaataagtttgctaaccataaggccatctggttcccttacaacatggactggcgcggtcgtgtttacgctgtgtcaatgttcaacccgcaaggtaacgatatgaccaaaggactgcttacgctggcgaaaggtaaaccaatcggtaaggaaggttactactggctgaaaatccacggtgcaaactgtgcgggtgtcgataaggttccgttccctgagcgcatcaagttcattgaggaaaaccacgagaacatcatggcttgcgctaagtctccactggagaacacttggtgggctgagcaagatagtccgttctgcttccttgcgttctgctttgagtacgctggggtacagcaccacggcctgagctataactgctcccttccgctggcgtttgacgggtcttgctctggcatccagcacttctccgcgatgctccgagatgaggtaggtggtcgcgcggttaacttgcttcctagtgaaaccgttcaggacatctacgggattgttgctaagaaagtcaacgagattctacaagcagacgcaatcaatgggaccgataacgaagtagttaccgtgaccgatgagaacgaaggtgaaatctctgagaaagtcaagctgggcactaaggcactggctggtcaatggctggcttacggtgttactcgcagtgtgactaagcgttcagtcatgacgctggcttacgggtccaaagagttcggcttccgtcaacaagtgctgcgccacactattcagccagctattgattccggcaagggtctgatgttcactcagccgaatcaggctgctggatacatggctaagctgatttgggaatctgtgagcgtgacggtggtagctgcggttgaagcaatgaactggcttaagtctgctgctaagctgctggctgctgaggtcaaagataagaagactggagagattcttcgcaagcgttgcgctgtgcattgggtaactcctgatggtttccctgtgtggcaggaatacaagaagcctattcagacgcgcttgaacctgatgttcctcggtcagttccgcttacagcctaccattaacaccaacaaagatagcgagattgatgcacataaacaggagtctggtatcgctcctaactttgtacacagccaagacggtagccaccttcgtaagactgtagtgtgggcacacgagaagtacggaatcgaatcttttgcactgattcacgactccttcggtaccattccggctgacgctgcgaacctgttcaaagcagtgcgcgaaactatggttgacacatatgagtcttgtgatgtactggctgatttctacgaccagttcgctgaccagttgcacgagtctcaattggacaaaatgccagcacttccggctaaaggtaacttgaacctccgtgacatcttagagtcggacttcgcgttcgcg

SEQ ID NO: 632 - protein, 890 aa, synthetic construct
  REGION 1..890: note = Variant of RNA polymerase
MHHHHHHMNTINIAKNDFSDIELAAIPFNTLADHYGEGLAREQLALEHESYTMGEARFRKMFERQLKAGEVADNAAAKPLITTLLPKMIARINDWFEEVKAKRGKRPTAFQFLQEIKPEAVAYITIKTTLACLTSADRTTVQAVASAIGRAIEDEARFGRIRDLEAKHFLKNVEEQLNKRVGHVYKKAFMQVVEADMLSKGLLGGEAWSSWHKEDSIHVGVRCIEMLIESTGMVSLHRQNAGVVGKDSETIELAPEYAEAIATRAGALAGISPMFQPCVVPPKPWTGITGGGYWANGRRPLALVRTHSKKGLMRYEDVYMPEVYKAINIAQNTAWSINKWVLAVANVITKWKHCPVEDIPAIEREELPMKPEDIDMNPEALTAWKRAKAAVYRKDKARKSRRILLEFMLEQANKFANHKAIWFPYNMDWRGRVYAVSMFNPQGNDMTKGLLTLAKGKPIGKEGYYWLKIHGANCAGVDKVPFPERIKFIEENHENIMACAKSPLENTWWAEQDSPFCFLAFCFEYAGVQHHGLSYNCSLPLAFDGSCSGIQHFSAMLRDEVGGRAVNLLPSETVQDIYGIVAKKVNEILQADAINGTDNEVVTVTDENEGEISEKVKLGTKALAGQWLAYGVTRSVTKRSVMTLAYGSKEFGFRQQVLRHTIQPAIDSGKGLMFTQPNQAAGYMAKLIWESVSVTVVAAVEAMNWLKSAAKLLAAEVKDKKTGEILRKRCAVHWVTPDGFPVWQEYKKPIQTRLNLMFLGQFRLQPTINTNKDSEIDAHKQESGIAPNFVHSQDGSHLRKTVVWAHEKYGIESFALIHDSFGTIPADAANLFKAVRETMVDTYESCDVLADFYDQFADQLHESQLDKMPALPAKGNLNLRDILESDFAFA

SEQ ID NO: 633 - DNA, 2670 bp, synthetic construct
  misc_feature 1..2670: note = Variant of RNA polymerase
  source 1..2670: mol_type = other DNA
atgcaccatcaccatcaccatatgaacacgattaacatcgctaagaacaacttctctgacatcgaactggctgctatcccgttcaacactctggctgaccattacggtgagggtttagctcgcgaacagttggcccttgagcatgagtcttacgagatgggtgaagcacgtttccgcaagatgtttgagcgtcaacttaaagctggtgaggttgcggataacgctgccgccaagcctctcatcactaccctactccctaagatgattgcaaggatcaacgactggtttgaggaagtgaaagctaagcgcggcaagcgcccgacagccttccagttcctgcaagaaatcaagccggaagccgtagcgtacatcaccattaagaccactctggcttgcctaaccagtgcggaccgtacaaccgttcaggctgtagcaagcgcaatcggtcgggccattgaggacgaggctcgcttcggtcgtatccgtgaccttgaagctaagcacttcctgaaaaacgttgaggaacaactcaacaagcgcgtagggcacgtctacaagaaagcatttatgcaagttgtcgaggctgacatgctctctaagggtctactcggtggcgaggcgtggtcttcgtggcataaggaagactctattcatgtaggagtacgctgcatcgagatgctcattgagtcaaccggaatggttagcttacaccgccaaaatgctggcgtagtaggtaaagactctgagactatcgaactcgcacctgaatacgctgaggctatcgcaacccgtgcaggtgcgctggctggcatctctccgatgttccaaccttgcgtagttcctcctaagccgtggactggcattactggtggtggctattgggctaacggtcgtcgtcctctggcgctggtgcgtactcacagtaagaaaggtctgatgcgctacgaagacgtttacatgcctgaggtgtacaaagcgattaacattgcgcaaaacaccgcctggtcgatcaacaagtgggtcctggcggtcgccaacgtaatcaccaagtggaagcattgtccggtcgaggacatccctgcgattgagcgtgaagaactcccgatgaaaccggaagacatcgacatgaatcctgaggctctcaccgcgtggaaacgtgctaaagctgctgtgtaccgcaaggacaaggctcgcaagtctcgccgtatcttgcttgagttcatgcttgagcaagccaataagtttgctaaccataaggccatctggttcccttacaacatggactggcgcggtcgtgtttacgctgtgtcaatgttcaacccgcaaggtaacgatatgaccaaaggactgcttacgctggcgaaaggtaaaccaatcggtaaggaaggttactactggctgaaaatccacggtgcaaactgtgcgggtgtcgataaggttccgttccctgagcgcatcaagttcattgaggaaaaccacgagaacatcatggcttgcgctaagtctccactggagaacacttggtgggctgagcaagatagtccgttctgcttccttgcgttctgctttgagtacgctggggtacagcaccacggcctgagctataactgctcccttccgctggcgtttgacgggtcttgctctggcatccagcacttctccgcgatgctccgagatgaggtaggtggtcgcgcggttaacttgcttcctagtgaaaccgttcaggacatctacgggattgttgctaagaaagtcaacgagattctacaagcagacgcaatcaatgggaccgataacgaagtagttaccgtgaccgatgagaacgaaggtgaaatctctgagaaagtcaagctgggcactaaggcactggctggtcaatggctggcttacggtgttactcgcagtgtgactaagcgttcagtcatgacgctggcttacgggtccaaagagttcggcttccgtcaacaagtgctgcgccacactattcagccagctattgattccggcaagggtctgatgttcactcagccgaatcaggctgctggatacatggctaagctgatttgggaatctgtgagcgtgacggtggtagctgcggttgaagcaatgaactggcttaagtctgctgctaagctgctggctgctgaggtcaaagataagaagactggagagattcttcgcaagcgttgcgctgtgcattgggtaactcctgatggtttccctgtgtggcaggaatacaagaagcctattcagacgcgcttgaacctgatgttcctcggtcagttccgcttacagcctaccattaacaccaacaaagatagcgagattgatgcacataaacaggagtctggtatcgctcctaactttgtacacagccaagacggtagccaccttcgtaagactgtagtgtgggcacacgagaagtacggaatcgaatcttttgcactgattcacgactccttcggtaccattccggctgacgctgcgaacctgttcaaagcagtgcgcgaaactatggttgacacatatgagtcttgtgatgtactggctgatttctacgaccagttcgctgaccagttgcacgagtctcaattggacaaaatgccagcacttccggctaaaggtaacttgaacctccgtgacatcttagagtcggacttcgcgttcgcg

SEQ ID NO: 634 - protein, 890 aa, synthetic construct
  REGION 1..890: note = Variant of RNA polymerase
MHHHHHHMNTINIAKNNFSDIELAAIPFNTLADHYGEGLAREQLALEHESYEMGEARFRKMFERQLKAGEVADNAAAKPLITTLLPKMIARINDWFEEVKAKRGKRPTAFQFLQEIKPEAVAYITIKTTLACLTSADRTTVQAVASAIGRAIEDEARFGRIRDLEAKHFLKNVEEQLNKRVGHVYKKAFMQVVEADMLSKGLLGGEAWSSWHKEDSIHVGVRCIEMLIESTGMVSLHRQNAGVVGKDSETIELAPEYAEAIATRAGALAGISPMFQPCVVPPKPWTGITGGGYWANGRRPLALVRTHSKKGLMRYEDVYMPEVYKAINIAQNTAWSINKWVLAVANVITKWKHCPVEDIPAIEREELPMKPEDIDMNPEALTAWKRAKAAVYRKDKARKSRRILLEFMLEQANKFANHKAIWFPYNMDWRGRVYAVSMFNPQGNDMTKGLLTLAKGKPIGKEGYYWLKIHGANCAGVDKVPFPERIKFIEENHENIMACAKSPLENTWWAEQDSPFCFLAFCFEYAGVQHHGLSYNCSLPLAFDGSCSGIQHFSAMLRDEVGGRAVNLLPSETVQDIYGIVAKKVNEILQADAINGTDNEVVTVTDENEGEISEKVKLGTKALAGQWLAYGVTRSVTKRSVMTLAYGSKEFGFRQQVLRHTIQPAIDSGKGLMFTQPNQAAGYMAKLIWESVSVTVVAAVEAMNWLKSAAKLLAAEVKDKKTGEILRKRCAVHWVTPDGFPVWQEYKKPIQTRLNLMFLGQFRLQPTINTNKDSEIDAHKQESGIAPNFVHSQDGSHLRKTVVWAHEKYGIESFALIHDSFGTIPADAANLFKAVRETMVDTYESCDVLADFYDQFADQLHESQLDKMPALPAKGNLNLRDILESDFAFA

SEQ ID NO: 635 - DNA, 2670 bp, synthetic construct
  misc_feature 1..2670: note = Variant of RNA polymerase
  source 1..2670: mol_type = other DNA
atgcaccatcaccatcaccatatgaacacgattaacatcgctaagaacgacttctctgacatcgaactggctgctatcccgttcaacactctggctgaccattacggtgagggtttagctcgcgaacagttggcccttgagcatgagtcttacgagatgggtgaaaatcgtttccgcaagatgtttgagcgtcaacttaaagctggtgaggttgcggataacgctgccgccaagcctctcatcactaccctactccctaagatgattgcacgcatcaacgactggtttgaggaagtgaaagctaagcgcggcaagcgcccgacagccttccagttcctgcaagaaatcaagccggaagccgtagcgtacatcaccattaagaccactctggcttgcctaaccagtgcggaccgtacaaccgttcaggctgtagcaagcgcaatcggtcgggccattgaggacgaggctcgcttcggtcgtatccgtgaccttgaagctaagcacttcctgaaaaacgttgaggaacaactcaacaagcgcgtagggcacgtctacaagaaagcatttatgcaagttgtcgaggctgacatgctctctaagggtctactcggtggcgaggcgtggtcttcgtggcataaggaagactctattcatgtaggagtacgctgcatcgagatgctcattgagtcaaccggaatggttagcttacaccgccaaaatgctggcgtagtaggtaaagactctgagactatcgaactcgcacctgaatacgctgaggctatcgcaacccgtgcaggtgcgctggctggcatctctccgatgttccaaccttgcgtagttcctcctaagccgtggactggcattactggtggtggctattgggctaacggtcgtcgtcctctggcgctggtgcgtactcacagtaagaaaggtctgatgcgctacgaagacgtttacatgcctgaggtgtacaaagcgattaacattgcgcaaaacaccgcctggtcgatcaacaagtgggtcctggcggtcgccaacgtaatcaccaagtggaagcattgtccggtcgaggacatccctgcgattgagcgtgaagaactcccgatgaaaccggaagacatcgacatgaatcctgaggctctcaccgcgtggaaacgtgctaaagctgctgtgtaccgcaaggacaaggctcgcaagtctcgccgtatcttgcttgagttcatgcttgagcaagccaataagtttgctaaccataaggccatctggttcccttacaacatggactggcgcggtcgtgtttacgctgtgtcaatgttcaacccgcaaggtaacgatatgaccaaaggactgcttacgctggcgaaaggtaaaccaatcggtaaggaaggttactactggctgaaaatccacggtgcaaactgtgcgggtgtcgataaggttccgttccctgagcgcatcaagttcattgaggaaaaccacgagaacatcatggcttgcgctaagtctccactggagaacacttggtgggctgagcaagatagtccgttctgcttccttgcgttctgctttgagtacgctggggtacagcaccacggcctgagctataactgctcccttccgctggcgtttgacgggtcttgctctggcatccagcacttctccgcgatgctccgagatgaggtaggtggtcgcgcggttaacttgcttcctagtgaaaccgttcaggacatctacgggattgttgctaagaaagtcaacgagattctacaagcagacgcaatcaatgggaccgataacgaagtagttaccgtgaccgatgagaacgaaggtgaaatctctgagaaagtcaagctgggcactaaggcactggctggtcaatggctggcttacggtgttactcgcagtgtgactaagcgttcagtcatgacgctggcttacgggtccaaagagttcggcttccgtcaacaagtgctgcgccacactattcagccagctattgattccggcaagggtctgatgttcactcagccgaatcaggctgctggatacatggctaagctgatttgggaatctgtgagcgtgacggtggtagctgcggttgaagcaatgaactggcttaagtctgctgctaagctgctggctgctgaggtcaaagataagaagactggagagattcttcgcaagcgttgcgctgtgcattgggtaactcctgatggtttccctgtgtggcaggaatacaagaagcctattcagacgcgcttgaacctgatgttcctcggtcagttccgcttacagcctaccattaacaccaacaaagatagcgagattgatgcacataaacaggagtctggtatcgctcctaactttgtacacagccaagacggtagccaccttcgtaagactgtagtgtgggcacacgagaagtacggaatcgaatcttttgcactgattcacgactccttcggtaccattccggctgacgctgcgaacctgttcaaagcagtgcgcgaaactatggttgacacatatgagtcttgtgatgtactggctgatttctacgaccagttcgctgaccagttgcacgagtctcaattggacaaaatgccagcacttccggctaaaggtaacttgaacctccgtgacatcttagagtcggacttcgcgttcgcg

SEQ ID NO: 636 - protein, 890 aa, synthetic construct
  REGION 1..890: note = Variant of RNA polymerase
MHHHHHHMNTINIAKNDFSDIELAAIPFNTLADHYGEGLAREQLALEHESYEMGENRFRKMFERQLKAGEVADNAAAKPLITTLLPKMIARINDWFEEVKAKRGKRPTAFQFLQEIKPEAVAYITIKTTLACLTSADRTTVQAVASAIGRAIEDEARFGRIRDLEAKHFLKNVEEQLNKRVGHVYKKAFMQVVEADMLSKGLLGGEAWSSWHKEDSIHVGVRCIEMLIESTGMVSLHRQNAGVVGKDSETIELAPEYAEAIATRAGALAGISPMFQPCVVPPKPWTGITGGGYWANGRRPLALVRTHSKKGLMRYEDVYMPEVYKAINIAQNTAWSINKWVLAVANVITKWKHCPVEDIPAIEREELPMKPEDIDMNPEALTAWKRAKAAVYRKDKARKSRRILLEFMLEQANKFANHKAIWFPYNMDWRGRVYAVSMFNPQGNDMTKGLLTLAKGKPIGKEGYYWLKIHGANCAGVDKVPFPERIKFIEENHENIMACAKSPLENTWWAEQDSPFCFLAFCFEYAGVQHHGLSYNCSLPLAFDGSCSGIQHFSAMLRDEVGGRAVNLLPSETVQDIYGIVAKKVNEILQADAINGTDNEVVTVTDENEGEISEKVKLGTKALAGQWLAYGVTRSVTKRSVMTLAYGSKEFGFRQQVLRHTIQPAIDSGKGLMFTQPNQAAGYMAKLIWESVSVTVVAAVEAMNWLKSAAKLLAAEVKDKKTGEILRKRCAVHWVTPDGFPVWQEYKKPIQTRLNLMFLGQFRLQPTINTNKDSEIDAHKQESGIAPNFVHSQDGSHLRKTVVWAHEKYGIESFALIHDSFGTIPADAANLFKAVRETMVDTYESCDVLADFYDQFADQLHESQLDKMPALPAKGNLNLRDILESDFAFA

SEQ ID NO: 637 - DNA, 2670 bp, synthetic construct
  misc_feature 1..2670: note = Variant of RNA polymerase
  source 1..2670: mol_type = other DNA
atgcaccatcaccatcaccatatgaacacgattaacatcgctaagaacgacttctctgacatcgaactggctgctatcccgttcaacactctggctgaccattacggtgagggtttagctcgcgaacagttggcccttgagcatgagtcttacgagatgggtgaagcacgtttccgcaagatgtttgagcgtcaacttaaagctggtgaggttgcggataacgctgccgccaagcctctcatcactaccctactccctaagatgattgcacgcatcaacgactggtttgaggaagtgaaagctaagcgcggcaagcgcccgacagccttccagttcctgcaagaaatcaagccggaagccgtagcgtacatcaccattaagaccactctggcttgcctaaccagtgcggaccgtacaaccgttcaggctgtagcaagcgcaatcggtcgggccattgaggacgaggctcgcttcggtcgtatccgtgaccttgaagctaagcacttcctgaaaaacgttgaggaacaactcaacaagcgcgtagggcacgtctacaagaaagcatttatgcaagttgtcgaggctgacatgctctctaagggtctactcggtggcgaggcgtggtcttcgtggcataaggaagactctattcatgtaggagtacgctgcatcgagatgctcattgagtcaaccggaatggttagcttacaccgccaaaatgctggcgtagtaggtaaagactctgagactatcgaactcgcacctgaatacgctgaggctatcgcaacccgtgcaggtgcgctggctggcatctctccgatgttccaaccttgcgtagttcctcctaagccgtggactggcattactggtggtggctattgggctaacggtcgtcgtcctctggcgctggtgcgtactcacagtaagaaaggtctgatgcgctacgaagacgtttacatgcctgaggtgtacaaagcgattaacattgcgcaaaacaccgcctggtcgatcaacaagtgggtcctggcggtcgccaacgtaatcaccaagtggaagcattgtccggtcgaggacatccctgcgattgagcgtgaagaactcccgatgaaaccggaagacatcgacatgaatcctgaggctctcaccgcgtggaaacgtgctaaagctgctgtgtaccgcaaggacaaggctcgcaagtctcgccgtatcttgcttgagttcatgcttgagcaagccaataagtttgctaaccataaggccatctggttcccttacaacatggactggcgcggtcgtgtttacgctgtgtcaatgttcaacccgcaaggtaacgatatgaccaaaggactgcttacgctggcgaaaggtaaaccaatcggtaaggaaggttactactggctgaaaatccacggtgcaaactgtgcgggtgtcgataaggttccgttccctgagcgcatcaagttcattgaggaaaaccacgagaacatcatggcttgcgctaagtctccactggagaacacttggtgggctgagcaagatagtccgttctgcttccttgcgttctgctttgagtacgctggggtacagcaccacggcctgagctataactgctcccttccgctggcgtttgacgggtcttgctctggcatccagcacttctccgcgatgctccgagatgaggtaggtggtcgcgcggttaacttgcttcctagtgaaaccgttcaggacatctacgggattgttgctaagaaagtcaacgagattctacaagcagacgcaatcaatgggaccaagaacgaagtagttaccgtgaccgatgagaacgaaggtgaaatctctgagaaagtcaagctgggcactaaggcactggctggtcaatggctggcttacggtgttactcgcagtgtgactaagcgttcagtcatgacgctggcttacgggtccaaagagttcggcttccgtcaacaagtgctgcgccacactattcagccagctattgattccggcaagggtctgatgttcactcagccgaatcaggctgctggatacatggctaagctgatttgggaatccgtgagcgtgacggtggtagctgcggttgaagcaatgaactggcttaagtctgctgctaagctgctggctgctgaggtcaaagataagaagactggagagattcttcgcaagcgttgcgctgtgcattgggtaactcctgatggtttccctgtgtggcaggaatacaagaagcctattcagacgcgcttgaacctgatgttcctcggtcagttccgcttacagcctaccattaacaccaacaaagatagcgagattgatgcacataaacaggagtctggtatcgctcctaactttgtacacagccaagacggtagccaccttcgtaagactgtagtgtgggcacacgagaagtacggaatcgaatcttttgcactgattcacgactccttcggtaccattccggctgacgctgcgaacctgttcaaagcagtgcgcgaaactatggttgacacatatgagtcttgtgatgtactggctgatttctacgaccagttcgctgaccagttgcacgagtctcaattggacaaaatgccagcacttccggctaaaggtaacttgaacctccgtgacatcttagagtcggacttcgcgttcgcg

SEQ ID NO: 638 - protein, 890 aa, synthetic construct
  REGION 1..890: note = Variant of RNA polymerase
MHHHHHHMNTINIAKNDFSDIELAAIPFNTLADHYGEGLAREQLALEHESYEMGEARFRKMFERQLKAGEVADNAAAKPLITTLLPKMIARINDWFEEVKAKRGKRPTAFQFLQEIKPEAVAYITIKTTLACLTSADRTTVQAVASAIGRAIEDEARFGRIRDLEAKHFLKNVEEQLNKRVGHVYKKAFMQVVEADMLSKGLLGGEAWSSWHKEDSIHVGVRCIEMLIESTGMVSLHRQNAGVVGKDSETIELAPEYAEAIATRAGALAGISPMFQPCVVPPKPWTGITGGGYWANGRRPLALVRTHSKKGLMRYEDVYMPEVYKAINIAQNTAWSINKWVLAVANVITKWKHCPVEDIPAIEREELPMKPEDIDMNPEALTAWKRAKAAVYRKDKARKSRRILLEFMLEQANKFANHKAIWFPYNMDWRGRVYAVSMFNPQGNDMTKGLLTLAKGKPIGKEGYYWLKIHGANCAGVDKVPFPERIKFIEENHENIMACAKSPLENTWWAEQDSPFCFLAFCFEYAGVQHHGLSYNCSLPLAFDGSCSGIQHFSAMLRDEVGGRAVNLLPSETVQDIYGIVAKKVNEILQADAINGTKNEVVTVTDENEGEISEKVKLGTKALAGQWLAYGVTRSVTKRSVMTLAYGSKEFGFRQQVLRHTIQPAIDSGKGLMFTQPNQAAGYMAKLIWESVSVTVVAAVEAMNWLKSAAKLLAAEVKDKKTGEILRKRCAVHWVTPDGFPVWQEYKKPIQTRLNLMFLGQFRLQPTINTNKDSEIDAHKQESGIAPNFVHSQDGSHLRKTVVWAHEKYGIESFALIHDSFGTIPADAANLFKAVRETMVDTYESCDVLADFYDQFADQLHESQLDKMPALPAKGNLNLRDILESDFAFA

SEQ ID NO: 639 - DNA, 2670 bp, synthetic construct
  misc_feature 1..2670: note = Variant of RNA polymerase
  source 1..2670: mol_type = other DNA
atgcaccatcaccatcaccatatgaacacgattaacatcgctaagaacgacttctctgacatcgaactggctgctatcccgttcaacactctggctgaccattacggtgagggtttagctcgcgaacagttggcccttgagcatgagtcttacgagatgggtgaagcacgtttccgcaagatgtttgagcgtcaacttaaagctggtgaggttgcggataacgctgccgccaagcctctcatcactaccctactccctaagatgattgcacgcatcaacgactggtttgaggaagtgaaagctaagcgcggcaagcgcccgacagccttccagttcctgcaagaaatcaagccggaagccgtagcgtacatcaccattaagaccactctggcttgcctaaccagtgcggaccgtacaaccgttcaggctgtagcaagcgcaatcggtcgggccattgaggacgaggctcgcttcggtcgtatccgtgaccttgaagctaagcacttcctgaaaaacgttgaggaacaactcaacaagcgcgtagggcacgtctacaagaaagcatttatgcaagttgtcgaggctgacatgctctctaagggtctactcggtggcgaggcgtggtcttcgtggcataaggaagactctattcatgtaggagtacgctgcatcgagatgctcattgagtcaaccggaatggttagcttacaccgccaaaatgctggcgtagtaggtaaagactctgagactatcgaactcgcacctgaatacgctgaggctatggcaacccgtgcaggtgcgctggctggcatctctccgatgttccaaccttgcgtagttcctcctaagccgtggactggcattactggtggtggctattgggctaacggtcgtcgtcctctggcgctggtgcgtactcacagtaagaaaggtctgatgcgctacgaagacgtttacatgcctgaggtgtacaaagcgattaacattgcgcaaaacaccgcctggtcgatcaacaagtgggtcctggcggtcgccaacgtaatcaccaagtggaagcattgtccggtcgaggacatccctgcgattgagcgtgaagaactcccgatgaaaccggaagacatcgacatgaatcctgaggctctcaccgcgtggaaacgtgctaaagctgctgtgtaccgcaaggacaaggctcgcaagtctcgccgtatcttgcttgagttcatgcttgagcaagccaataagtttgctaaccataaggccatctggttcccttacaacatggactggcgcggtcgtgtttacgctgtgtcaatgttcaacccgcaaggtaacgatatgaccaaaggactgcttacgctggcgaaaggtaaaccaatcggtaaggaaggttactactggctgaaaatccacggtgcaaactgtgcgggtgtcgataaggttccgttccctgagcgcatcaagttcattgaggaaaaccacgagaacatcatggcttgcgctaagtctccactggagaacacttggtgggctgagcaagatagtccgttctgcttccttgcgttctgctttgagtacgctggggtacagcaccacggcctgagctataactgctcccttccgctggcgtttgacgggtcttgctctggcatccagcacttctccgcgatgctccgagatgaggtaggtggtcgcgcggttaacttgcttcctagtgaaaccgttcaggacatctacgggattgttgctaagaaagtcaacgagattctacaagcagacgcaatcaatgggaccgataacgaagtagttaccgtgaccgatgagaacgaaggtgaaatctctgagaaagtcaagctgggcactaaggcactggctggtcaatggctggcttacggtgttactcgcagtgtgactaagcgttcagtcatgacgctggcttacgggtccaaagagttcggcttccgtcaacaagtgctgcgccacactattcagccagctattgattccggcaagggtctgatgttcactcagccgaatcaggctgctggatacatggctaagctgatttgggaatctgtgagcgtgacggtggtagctgcggttgaagcaatgaactggcttaagtctgctgctaagctgctggctgctgaggtcaaagataagaagactggagagattcttcgcaagcgttgcgctgtgcattgggtaactcctgatggtttccctgtgtggcaggaatacaagaagcctattcagacgcgcttgaacctgatgttcctcggtcagttccgcttacagcctaccattaacaccaacaaagatagcgagattgatgcacataaacaggagtctggtatcgctcctaactttgtacacagccaagacggtagccaccttcgtaagactgtagtgtgggcacacgagaagtacggaatcgaatcttttgcactgattcacgactccttcggtaccattccggctgacgctgcgaacctgttcaaagcagtgcgcgaaactatggttgacacatatgagtcttgtgatgtactggctgatttctacgaccagttcgctgaccagttgcacgagtctcaattggacaaaatgccagcacttccggctaaaggtaacttgaacctccgtgacatcttagagtcggacttcgcgttcgcg

SEQ ID NO: 640 - protein, 890 aa, synthetic construct
  REGION 1..890: note = Variant of RNA polymerase
MHHHHHHMNTINIAKNDFSDIELAAIPFNTLADHYGEGLAREQLALEHESYEMGEARFRKMFERQLKAGEVADNAAAKPLITTLLPKMIARINDWFEEVKAKRGKRPTAFQFLQEIKPEAVAYITIKTTLACLTSADRTTVQAVASAIGRAIEDEARFGRIRDLEAKHFLKNVEEQLNKRVGHVYKKAFMQVVEADMLSKGLLGGEAWSSWHKEDSIHVGVRCIEMLIESTGMVSLHRQNAGVVGKDSETIELAPEYAEAMATRAGALAGISPMFQPCVVPPKPWTGITGGGYWANGRRPLALVRTHSKKGLMRYEDVYMPEVYKAINIAQNTAWSINKWVLAVANVITKWKHCPVEDIPAIEREELPMKPEDIDMNPEALTAWKRAKAAVYRKDKARKSRRILLEFMLEQANKFANHKAIWFPYNMDWRGRVYAVSMFNPQGNDMTKGLLTLAKGKPIGKEGYYWLKIHGANCAGVDKVPFPERIKFIEENHENIMACAKSPLENTWWAEQDSPFCFLAFCFEYAGVQHHGLSYNCSLPLAFDGSCSGIQHFSAMLRDEVGGRAVNLLPSETVQDIYGIVAKKVNEILQADAINGTDNEVVTVTDENEGEISEKVKLGTKALAGQWLAYGVTRSVTKRSVMTLAYGSKEFGFRQQVLRHTIQPAIDSGKGLMFTQPNQAAGYMAKLIWESVSVTVVAAVEAMNWLKSAAKLLAAEVKDKKTGEILRKRCAVHWVTPDGFPVWQEYKKPIQTRLNLMFLGQFRLQPTINTNKDSEIDAHKQESGIAPNFVHSQDGSHLRKTVVWAHEKYGIESFALIHDSFGTIPADAANLFKAVRETMVDTYESCDVLADFYDQFADQLHESQLDKMPALPAKGNLNLRDILESDFAFA

SEQ ID NO: 641 - DNA, 2670 bp, synthetic construct
  misc_feature 1..2670: note = Variant of RNA polymerase
  source 1..2670: mol_type = other DNA
atgcaccatcaccatcaccatatgaacacgattaacatcgctaagaacgacttctctgacatcgaactggctgctatcccgttcaacactctggctgaccattacggtgagggtttagctcgcgaacagttggcccttgagcatgagtcttacgagatgggtgaagagcgtttccgcaagatgtttgagcgtcaacttaaagctggtgaggttgcggataacgctgccgccaagcctctcatcactaccctactccctaagatgattgcacgcatcaacgactggtttgaggaagtgaaagctaagcgcggcaagcgcccgacagccttccagttcctgcaagaaatcaagccggaagccgtagcgtacatcaccattaagaccactctggcttgcctaaccagtgcggaccgtacaaccgttcaggctgtagcaagcgcaatcggtcgggccattgaggacgaggctcgcttcggtcgtatccgtgaccttgaagctaagcacttcctgaaaaacgttgaggaacaactcaacaagcgcgtagggcacgtctacaagaaagcatttatgcaagttgtcgaggctgacatgctctctaagggtctactcggtggcgaggcgtggtcttcgtggcataaggaagactctattcatgtaggagtacgctgcatcgagatgctcattgagtcaaccggaatggttagcttacaccgccaaaatgctggcgtagtaggtaaagactctgagactatcgaactcgcacctgaatacgctgaggctatcgcaacccgtgcaggtgcgctggctggcatctctccgatgttccaaccttgcgtagttcctcctaagccgtggactggcattactggtggtggctattgggctaacggtcgtcgtcctctggcgctggtgcgtactcacagtaagaaaggtctgatgcgctacgaagacgtttacatgcctgaggtgtacaaagcgattaacattgcgcaaaacaccgcctggtcgatcaacaagtgggtcctggcggtcgccaacgtaatcaccaagtggaagcattgtccggtcgaggacatccctgcgattgagcgtgaagaactcccgatgaaaccggaagacatcgacatgaatcctgaggctctcaccgcgtggaaacgtgctaaagctgctgtgtaccgcaaggacaaggctcgcaagtctcgccgtatcttgcttgagttcatgcttgagcaagccaataagtttgctaaccataaggccatctggttcccttacaacatggactggcgcggtcgtgtttacgctgtgtcaatgttcaacccgcaaggtaacgatatgaccaaaggactgcttacgctggcgaaaggtaaaccaatcggtaaggaaggttactactggctgaaaatccacggtgcaaactgtgcgggtgtcgataaggttccgttccctgagcgcatcaagttcattgaggaaaaccacgagaacatcatggcttgcgctaagtctccactggagaacacttggtgggctgagcaagatagtccgttctgcttccttgcgttctgctttgagtacgctggggtacagcaccacggcctgagctataactgctcccttccgctggcgtttgacgggtcttgctctggcatccagcacttctccgcgatgctccgagatgaggtaggtggtcgcgcggttaacttgcttcctagtgaaaccgttcaggacatctacgggattgttgctaagaaagtcaacgagattctacaagcagacgcaatcaatgggaccgataacgaagtagttaccgtgaccgatgagaacgaaggtgaaatctctgagaaagtcaagctgggcactaaggcactggctggtcaatggctggcttacggtgttactcgcagtgtgactaagcgttcagtcatgacgctggcttacgggtccaaagagttcggcttccgtcaacaagtgctgcgccacactattcagccagctattgattccggcaagggtctgatgttcactcagccgaatcaggctgctggatacatggctaagctgatttgggaatctgtgagcgtgacggtggtagctgcggttgaagcaatgaactggcttaagtctgctgctaagctgctggctgctgaggtcaaagataagaagactggagagattcttcgcaagcgttgcgctgtgcattgggtaactcctgatggtttccctgtgtggcaggaatacaagaagcctattcagacgcgcttgaacctgatgttcctcggtcagttccgcttacagcctaccattaacaccaacaaagatagcgagattgatgcacataaacaggagtctggtatcgctcctaactttgtacacagccaagacggtagccaccttcgtaagactgtagtgtgggcacacgagaagtacggaatcgaatcttttgcactgattcacgactccttcggtaccattccggctgacgctgcgaacctgttcaaagcagtgcgcgaaactatggttgacacatatgagtcttgtgatgtactggctgatttctacgaccagttcgctgaccagttgcacgagtctcaattggacaaaatgccagcacttccggctaaaggtaacttgaacctccgtgacatcttagagtcggacttcgcgttcgcg

SEQ ID NO: 642 - protein, 890 aa, synthetic construct
  REGION 1..890: note = Variant of RNA polymerase
MHHHHHHMNTINIAKNDFSDIELAAIPFNTLADHYGEGLAREQLALEHESYEMGEERFRKMFERQLKAGEVADNAAAKPLITTLLPKMIARINDWFEEVKAKRGKRPTAFQFLQEIKPEAVAYITIKTTLACLTSADRTTVQAVASAIGRAIEDEARFGRIRDLEAKHFLKNVEEQLNKRVGHVYKKAFMQVVEADMLSKGLLGGEAWSSWHKEDSIHVGVRCIEMLIESTGMVSLHRQNAGVVGKDSETIELAPEYAEAIATRAGALAGISPMFQPCVVPPKPWTGITGGGYWANGRRPLALVRTHSKKGLMRYEDVYMPEVYKAINIAQNTAWSINKWVLAVANVITKWKHCPVEDIPAIEREELPMKPEDIDMNPEALTAWKRAKAAVYRKDKARKSRRILLEFMLEQANKFANHKAIWFPYNMDWRGRVYAVSMFNPQGNDMTKGLLTLAKGKPIGKEGYYWLKIHGANCAGVDKVPFPERIKFIEENHENIMACAKSPLENTWWAEQDSPFCFLAFCFEYAGVQHHGLSYNCSLPLAFDGSCSGIQHFSAMLRDEVGGRAVNLLPSETVQDIYGIVAKKVNEILQADAINGTDNEVVTVTDENEGEISEKVKLGTKALAGQWLAYGVTRSVTKRSVMTLAYGSKEFGFRQQVLRHTIQPAIDSGKGLMFTQPNQAAGYMAKLIWESVSVTVVAAVEAMNWLKSAAKLLAAEVKDKKTGEILRKRCAVHWVTPDGFPVWQEYKKPIQTRLNLMFLGQFRLQPTINTNKDSEIDAHKQESGIAPNFVHSQDGSHLRKTVVWAHEKYGIESFALIHDSFGTIPADAANLFKAVRETMVDTYESCDVLADFYDQFADQLHESQLDKMPALPAKGNLNLRDILESDFAFA

SEQ ID NO: 643 - DNA, 2670 bp, synthetic construct
  misc_feature 1..2670: note = Variant of RNA polymerase
  source 1..2670: mol_type = other DNA
atgcaccatcaccatcaccatatgaacacgattaacatcgctaagaacgacttctctgacatcgaactggctgctatcccgttcaacactctggctgaccattacggtgagggtttagctcgcgaacagttggcccttgagcatgagtcttacgagatgggttcggcacgtttccgcaagatgtttgagcgtcaacttaaagctggtgaggttgcggataacgctgccgccaagcctctcatcactaccctactccctaagatgattgcacgcatcaacgactggtttgaggaagtgaaagctaagcgcggcaagcgcccgacagccttccagttcctgcaagaaatcaagccggaagccgtagcgtacatcaccattaagaccactctggcttgcctaaccagtgcggaccgtacaaccgttcaggctgtagcaagcgcaatcggtcgggccattgaggacgaggctcgcttcggtcgtatccgtgaccttgaagctaagcacttcctgaaaaacgttgaggaacaactcaacaagcgcgtagggcacgtctacaagaaagcatttatgcaagttgtcgaggctgacatgctctctaagggtctactcggtggcgaggcgtggtcttcgtggcataaggaagactctattcatgtaggagtacgctgcatcgagatgctcattgagtcaaccggaatggttagcttacaccgccaaaatgctggcgtagtaggtaaagactctgagactatcgaactcgcacctgaatacgctgaggctatcgcaacccgtgcaggtgcgctggctggcatctctccgatgttccaaccttgcgtagttcctcctaagccgtggactggcattactggtggtggctattgggctaacggtcgtcgtcctctggcgctggtgcgtactcacagtaagaaaggtctgatgcgctacgaagacgtttacatgcctgaggtgtacaaagcgattaacattgcgcaaaacaccgcctggtcgatcaacaagtgggtcctggcggtcgccaacgtaatcaccaagtggaagcattgtccggtcgaggacatccctgcgattgagcgtgaagaactcccgatgaaaccggaagacatcgacatgaatcctgaggctctcaccgcgtggaaacgtgctaaagctgctgtgtaccgcaaggacaaggctcgcaagtctcgccgtatcttgcttgagttcatgcttgagcaagccaataagtttgctaaccataaggccatctggttcccttacaacatggactggcgcggtcgtgtttacgctgtgtcaatgttcaacccgcaaggtaacgatatgaccaaaggactgcttacgctggcgaaaggtaaaccaatcggtaaggaaggttactactggctgaaaatccacggtgcaaactgtgcgggtgtcgataaggttccgttccctgagcgcatcaagttcattgaggaaaaccacgagaacatcatggcttgcgctaagtctccactggagaacacttggtgggctgagcaagatagtccgttctgcttccttgcgttctgctttgagtacgctggggtacagcaccacggcctgagctataactgctcccttccgctggcgtttgacgggtcttgctctggcatccagcacttctccgcgatgctccgagatgaggtaggtggtcgcgcggttaacttgcttcctagtgaaaccgttcaggacatctacgggattgttgctaagaaagtcaacgagattctacaagcagacgcaatcaatgggaccgataacgaagtagttaccgtgaccgatgagaacgaaggtgaaatctctgagaaagtcaagctgggcactaaggcactggctggtcaatggctggcttacggtgttactcgcagtgtgactaagcgttcagtcatgacgctggcttacgggtccaaagagttcggcttccgtcaacaagtgctgcgccacactattcagccagctattgattccggcaagggtctgatgttcactcagccgaatcaggctgctggatacatggctaagctgatttgggaatctgtgagcgtgacggtggtagctgcggttgaagcaatgaactggcttaagtctgctgctaagctgctggctgctgaggtcaaagataagaagactggagagattcttcgcaagcgttgcgctgtgcattgggtaactcctgatggtttccctgtgtggcaggaatacaagaagcctattcagacgcgcttgaacctgatgttcctcggtcagttccgcttacagcctaccattaacaccaacaaagatagcgagattgatgcacataaacaggagtctggtatcgctcctaactttgtacacagccaagacggtagccaccttcgtaagactgtagtgtgggcacacgagaagtacggaatcgaatcttttgcactgattcacgactccttcggtaccattccggctgacgctgcgaacctgttcaaagcagtgcgcgaaactatggttgacacatatgagtcttgtgatgtactggctgatttctacgaccagttcgctgaccagttgcacgagtctcaattggacaaaatgccagcacttccggctaaaggtaacttgaacctccgtgacatcttagagtcggacttcgcgttcgcg

SEQ ID NO: 644 - protein, 890 aa, synthetic construct
  REGION 1..890: note = Variant of RNA polymerase
MHHHHHHMNTINIAKNDFSDIELAAIPFNTLADHYGEGLAREQLALEHESYEMGSARFRKMFERQLKAGEVADNAAAKPLITTLLPKMIARINDWFEEVKAKRGKRPTAFQFLQEIKPEAVAYITIKTTLACLTSADRTTVQAVASAIGRAIEDEARFGRIRDLEAKHFLKNVEEQLNKRVGHVYKKAFMQVVEADMLSKGLLGGEAWSSWHKEDSIHVGVRCIEMLIESTGMVSLHRQNAGVVGKDSETIELAPEYAEAIATRAGALAGISPMFQPCVVPPKPWTGITGGGYWANGRRPLALVRTHSKKGLMRYEDVYMPEVYKAINIAQNTAWSINKWVLAVANVITKWKHCPVEDIPAIEREELPMKPEDIDMNPEALTAWKRAKAAVYRKDKARKSRRILLEFMLEQANKFANHKAIWFPYNMDWRGRVYAVSMFNPQGNDMTKGLLTLAKGKPIGKEGYYWLKIHGANCAGVDKVPFPERIKFIEENHENIMACAKSPLENTWWAEQDSPFCFLAFCFEYAGVQHHGLSYNCSLPLAFDGSCSGIQHFSAMLRDEVGGRAVNLLPSETVQDIYGIVAKKVNEILQADAINGTDNEVVTVTDENEGEISEKVKLGTKALAGQWLAYGVTRSVTKRSVMTLAYGSKEFGFRQQVLRHTIQPAIDSGKGLMFTQPNQAAGYMAKLIWESVSVTVVAAVEAMNWLKSAAKLLAAEVKDKKTGEILRKRCAVHWVTPDGFPVWQEYKKPIQTRLNLMFLGQFRLQPTINTNKDSEIDAHKQESGIAPNFVHSQDGSHLRKTVVWAHEKYGIESFALIHDSFGTIPADAANLFKAVRETMVDTYESCDVLADFYDQFADQLHESQLDKMPALPAKGNLNLRDILESDFAFA

SEQ ID NO: 645 - DNA, 2670 bp, synthetic construct
  misc_feature 1..2670: note = Variant of RNA polymerase
  source 1..2670: mol_type = other DNA
atgcaccatcaccatcaccatatgaacacgattaacatcgctaagaacgacttctctgacatcgaactggctgctatcccgttcaacactctggctgaccattacggtgagggtttagctcgcgaacagttggcccttgagcatgagtcttacgagatgggtgaagcacgtttccgcaagatgtttgagcgtcaacttaaagctggtgaggttgcggataacgctgccgccaagcctctcatcactaccctactccctaagatgattgcacgcatcaacgactggtttgaggaagtgaaagctaagcgcggcaagcgcccgacagccttccagttcctgcaagaaatcaagccggaagccgtagcgtacatcaccattaagaccactctggcttgcctaaccagtgcggaccgtacaaccgttcaggctgtagcaagcgcaatcggtcgggccattgaggacgaggctcgcttcggtcgtatccgtgaccttgaagctaagcacttcctgaaaaacgttgaggaacaactcaacaagcgcgtagggcacgtctacaagaaagcatttatgcaagttgtcgaggctgacatgctctctaagggtctactcggtggcgaggcgtggtcttcgtggcataaggaagactctattcatgtaggagtacgctgcatcgagatgctcattgagtcaaccggaatggttagcttacaccgccaaaatgctggcgtagtaggtaaagactctgagactatcgaactcgcacctgaatacgctgaggctatcgcaacccgtgcaggtgcgctggctggcatctctccgatgttccaaccttgcgtagttcctcctaagccgtggactggcattactggtggtggctattgggctaacggtcgtcgtcctctggcgctggtgcgtactcacagtaagaaaggtctgatgcgctacgaagacgtttacatgcctgaggtgtacaaagcgattaacattgcgcaaaacaccgcctggtcgatcaacaagtgggtcctggcggtcgccaacgtaatcaccaagtggaagcattgtccggtcgaggacatccctgcgattgagcgtgaagaactcccgatgaaaccggaagacatcgacatgaatcctgaggctctcaccgcgtggaaacgtgctaaagctgctgtgtaccgcaaggacaaggctcgcaagtctcgccgtatcttgcttgagttcatgcttgagcaagccaataagtttgctaaccataaggccatctggttcccttacaacatggactggcgcggtcgtgtttacgctgtgtcaatgttcaacccgcaaggtaacgatatgaccaaaggactgcttacgctggcgaaaggtaaaccaatcggtaaggaaggttactactggctgaaaatccacggtgcaaactgtgcgggtgtcgataaggttccgttccctgagcgcatcaagttcattgaggaaaaccacgagaacatcatggcttgcgctaagtctccactggagaacacttggtgggctgagcaagatagtccgttctgcttccttgcgttctgctttgagtacgctggggtacagcaccacggcctgagctatgagtgctcccttccgctggcgtttgacgggtcttgctctggcatccagcacttctccgcgatgctccgagatgaggtaggtggtcgcgcggttaacttgcttcctagtgaaaccgttcaggacatctacgggattgttgctaagaaagtcaacgagattctacaagcagacgcaatcaatgggaccgataacgaagtagttaccgtgaccgatgagaacgaaggtgaaatctctgagaaagtcaagctgggcactaaggcactggctggtcaatggctggcttacggtgttactcgcagtgtgactaagcgttcagtcatgacgctggcttacgggtccaaagagttcggcttccgtcaacaagtgctgcgccacactattcagccagctattgattccggcaagggtctgatgttcactcagccgaatcaggctgctggatacatggctaagctgatttgggaatctgtgagcgtgacggtggtagctgcggttgaagcaatgaactggcttaagtctgctgctaagctgctggctgctgaggtcaaagataagaagactggagagattcttcgcaagcgttgcgctgtgcattgggtaactcctgatggtttccctgtgtggcaggaatacaagaagcctattcagacgcgcttgaacctgatgttcctcggtcagttccgcttacagcctaccattaacaccaacaaagatagcgagattgatgcacataaacaggagtctggtatcgctcctaactttgtacacagccaagacggtagccaccttcgtaagactgtagtgtgggcacacgagaagtacggaatcgaatcttttgcactgattcacgactccttcggtaccattccggctgacgctgcgaacctgttcaaagcagtgcgcgaaactatggttgacacatatgagtcttgtgatgtactggctgatttctacgaccagttcgctgaccagttgcacgagtctcaattggacaaaatgccagcacttccggctaaaggtaacttgaacctccgtgacatcttagagtcggacttcgcgttcgcg

SEQ ID NO: 646 - protein, 890 aa, synthetic construct
  REGION 1..890: note = Variant of RNA polymerase
MHHHHHHMNTINIAKNDFSDIELAAIPFNTLADHYGEGLAREQLALEHESYEMGEARFRKMFERQLKAGEVADNAAAKPLITTLLPKMIARINDWFEEVKAKRGKRPTAFQFLQEIKPEAVAYITIKTTLACLTSADRTTVQAVASAIGRAIEDEARFGRIRDLEAKHFLKNVEEQLNKRVGHVYKKAFMQVVEADMLSKGLLGGEAWSSWHKEDSIHVGVRCIEMLIESTGMVSLHRQNAGVVGKDSETIELAPEYAEAIATRAGALAGISPMFQPCVVPPKPWTGITGGGYWANGRRPLALVRTHSKKGLMRYEDVYMPEVYKAINIAQNTAWSINKWVLAVANVITKWKHCPVEDIPAIEREELPMKPEDIDMNPEALTAWKRAKAAVYRKDKARKSRRILLEFMLEQANKFANHKAIWFPYNMDWRGRVYAVSMFNPQGNDMTKGLLTLAKGKPIGKEGYYWLKIHGANCAGVDKVPFPERIKFIEENHENIMACAKSPLENTWWAEQDSPFCFLAFCFEYAGVQHHGLSYECSLPLAFDGSCSGIQHFSAMLRDEVGGRAVNLLPSETVQDIYGIVAKKVNEILQADAINGTDNEVVTVTDENEGEISEKVKLGTKALAGQWLAYGVTRSVTKRSVMTLAYGSKEFGFRQQVLRHTIQPAIDSGKGLMFTQPNQAAGYMAKLIWESVSVTVVAAVEAMNWLKSAAKLLAAEVKDKKTGEILRKRCAVHWVTPDGFPVWQEYKKPIQTRLNLMFLGQFRLQPTINTNKDSEIDAHKQESGIAPNFVHSQDGSHLRKTVVWAHEKYGIESFALIHDSFGTIPADAANLFKAVRETMVDTYESCDVLADFYDQFADQLHESQLDKMPALPAKGNLNLRDILESDFAFA

SEQ ID NO: 647 - DNA, 2670 bp, synthetic construct
  misc_feature 1..2670: note = Variant of RNA polymerase
  source 1..2670: mol_type = other DNA
atgcaccatcaccatcaccatatgaacacgattaacatcgctaagaacgacttctctgacatcgaactggctgctatcccgttcaacactctggctgaccattacggtgagggtttagctcgcgaacagttggcccttgagcatgagtcttacgagatgggtgaagcacgtttccgcaagatgtttgagcgtcaacttaaagctggtgaggttgcggataacgctgccgccaagcctctcatcactaccctactccctaagatgattgcacgcatcaacgactggtttgaggaagtgaaagctaagcgcggcaagcgcccgacagccttccagttcctgcaagaaatcaagccggaagccgtagcgtacatcaccattaagaccactctggcttgcctaaccagtgcggaccgtacaaccgttcaggctgtagcaagcgcaatcggtcgggccattgaggacgaggctcgcttcggtcgtatccgtgaccttgaagctaagcacttcctgaaaaacgttgaggaacaactcaacaagcgcgtagggcacgtctacaagaaagcatttatgcaagttgtcgaggctgacatgctctctaagggtctactcggtggcgaggcgtggtcttcgtggcataaggaagactctattcatgtaggagtacgctgcatcgagatgctcattgagtcaaccggaatggttagcttacaccgccaaaatgctggcgtagtaggtaaagactctgagactatcgaactcgcacctgaatacgctgaggctatcgcaacccgtgcaggtgcgctggctggcatctctccgatgttccaaccttgcgtagttcctcctaagccgtggactggcattactggtggtggctattgggctaacggtcgtcgtcctctggcgctggtgcgtactcacagtaagaaaggtctgatgcgctacgaagacgtttacatgcctgaggtgtacaaagcgattaacattgcgcaaaacaccgcctggtcgatcaacaagtgggtcctggcggtcgccaacgtaatcaccaagtggaagcattgtccggtcgaggacatccctgcgattgagcgtgaagaactcccgatgaaaccggaagacatcgacatgaatcctgaggctctcaccgcgtggaaacgtgctaaagctgctgtgtaccgcaaggacaaggctcgcaagtctcgccgtatcttgcttgagttcatgcttgagcaagccaataagtttgctaaccataaggccatctggttcccttacaacatggactggcgcggtcgtgtttacgctgtgtcaatgttcaacccgcaaggtaacgatatgaccaaaggactgcttacgctggcgaaaggtaaaccaatcggtaaggaaggttactactggctgaaaatccacggtgcaaactgtgcgggtgtcgataaggttccgttccctgagcgcatcaagttcattgaggaaaaccacgagaacatcatggcttgcgctaagtctccactggagaacacttggtgggctgagcaagatagtccgttctgcttccttgcgttctgctttgagtacgctggggtacagcaccacggcctgagctataactgctcccttccgctggcgtttgacgggtcttgctctggcatccagcacttctccgcgatgctccgagatgaggtaggtggtcgcgcggttaacttgcttcctagtgaaaccgttcaggacatctacgggattgttgctaagaaagtcaacgagattctacaagcagacgcaatcaatgggaccttgaacgaagtagttaccgtgaccgatgagaacgaaggtgaaatctctgagaaagtcaagctgggcactaaggcactggctggtcaatggctggcttacggtgttactcgcagtgtgactaagcgttcagtcatgacgctggcttacgggtccaaagagttcggcttccgtcaacaagtgctgcgccacactattcagccagctattgattccggcaagggtctgatgttcactcagccgaatcaggctgctggatacatggctaagctgatttgggaatctgtgagcgtgacggtggtagctgcggttgaagcaatgaactggcttaagtctgctgctaagctgctggctgctgaggtcaaagataagaagactggagagattcttcgcaagcgttgcgctgtgcattgggtaactcctgatggtttccctgtgtggcaggaatacaagaagcctattcagacgcgcttgaacctgatgttcctcggtcagttccgcttacagcctaccattaacaccaacaaagatagcgagattgatgcacataaacaggagtctggtatcgctcctaactttgtacacagccaagacggtagccaccttcgtaagactgtagtgtgggcacacgagaagtacggaatcgaatcttttgcactgattcacgactccttcggtaccattccggctgacgctgcgaacctgttcaaagcagtgcgcgaaactatggttgacacatatgagtcttgtgatgtactggctgatttctacgaccagttcgctgaccagttgcacgagtctcaattggacaaaatgccagcacttccggctaaaggtaacttgaacctccgtgacatcttagagtcggacttcgcgttcgcg

SEQ ID NO: 648 - protein, 890 aa, synthetic construct
  REGION 1..890: note = Variant of RNA polymerase
MHHHHHHMNTINIAKNDFSDIELAAIPFNTLADHYGEGLAREQLALEHESYEMGEARFRKMFERQLKAGEVADNAAAKPLITTLLPKMIARINDWFEEVKAKRGKRPTAFQFLQEIKPEAVAYITIKTTLACLTSADRTTVQAVASAIGRAIEDEARFGRIRDLEAKHFLKNVEEQLNKRVGHVYKKAFMQVVEADMLSKGLLGGEAWSSWHKEDSIHVGVRCIEMLIESTGMVSLHRQNAGVVGKDSETIELAPEYAEAIATRAGALAGISPMFQPCVVPPKPWTGITGGGYWANGRRPLALVRTHSKKGLMRYEDVYMPEVYKAINIAQNTAWSINKWVLAVANVITKWKHCPVEDIPAIEREELPMKPEDIDMNPEALTAWKRAKAAVYRKDKARKSRRILLEFMLEQANKFANHKAIWFPYNMDWRGRVYAVSMFNPQGNDMTKGLLTLAKGKPIGKEGYYWLKIHGANCAGVDKVPFPERIKFIEENHENIMACAKSPLENTWWAEQDSPFCFLAFCFEYAGVQHHGLSYNCSLPLAFDGSCSGIQHFSAMLRDEVGGRAVNLLPSETVQDIYGIVAKKVNEILQADAINGTLNEVVTVTDENEGEISEKVKLGTKALAGQWLAYGVTRSVTKRSVMTLAYGSKEFGFRQQVLRHTIQPAIDSGKGLMFTQPNQAAGYMAKLIWESVSVTVVAAVEAMNWLKSAAKLLAAEVKDKKTGEILRKRCAVHWVTPDGFPVWQEYKKPIQTRLNLMFLGQFRLQPTINTNKDSEIDAHKQESGIAPNFVHSQDGSHLRKTVVWAHEKYGIESFALIHDSFGTIPADAANLFKAVRETMVDTYESCDVLADFYDQFADQLHESQLDKMPALPAKGNLNLRDILESDFAFA

SEQ ID NO: 649 - DNA, 2670 bp, synthetic construct
  misc_feature 1..2670: note = Variant of RNA polymerase
  source 1..2670: mol_type = other DNA
atgcaccatcaccatcaccatatgaacacgattaacatcgctaagaacgacttctctgacatcgaactggctgctatcccgttcaacactctggctgaccattacggtgagggtttagctcgcgaacagttggcccttgagcatgagtcttacgagatgggtgaagcacgtttccgcaagatgtttgagcgtcaacttaaagctggtgaggttgcggataacgctgccgcctcgcctctcatcactaccctactccctaagatgattgcacgcatcaacgactggtttgaggaagtgaaagctaagcgcggcaagcgcccgacagccttccagttcctgcaagaaatcaagccggaagccgtagcgtacatcaccattaagaccactctggcttgcctaaccagtgcggaccgtacaaccgttcaggctgtagcaagcgcaatcggtcgggccattgaggacgaggctcgcttcggtcgtatccgtgaccttgaagctaagcacttcctgaaaaacgttgaggaacaactcaacaagcgcgtagggcacgtctacaagaaagcatttatgcaagttgtcgaggctgacatgctctctaagggtctactcggtggcgaggcgtggtcttcgtggcataaggaagactctattcatgtaggagtacgctgcatcgagatgctcattgagtcaaccggaatggttagcttacaccgccaaaatgctggcgtagtaggtaaagactctgagactatcgaactcgcacctgaatacgctgaggctatcgcaacccgtgcaggtgcgctggctggcatctctccgatgttccaaccttgcgtagttcctcctaagccgtggactggcattactggtggtggctattgggctaacggtcgtcgtcctctggcgctggtgcgtactcacagtaagaaaggtctgatgcgctacgaagacgtttacatgcctgaggtgtacaaagcgattaacattgcgcaaaacaccgcctggtcgatcaacaagtgggtcctggcggtcgccaacgtaatcaccaagtggaagcattgtccggtcgaggacatccctgcgattgagcgtgaagaactcccgatgaaaccggaagacatcgacatgaatcctgaggctctcaccgcgtggaaacgtgctaaagctgctgtgtaccgcaaggacaaggctcgcaagtctcgccgtatcttgcttgagttcatgcttgagcaagccaataagtttgctaaccataaggccatctggttcccttacaacatggactggcgcggtcgtgtttacgctgtgtcaatgttcaacccgcaaggtaacgatatgaccaaaggactgcttacgctggcgaaaggtaaaccaatcggtaaggaaggttactactggctgaaaatccacggtgcaaactgtgcgggtgtcgataaggttccgttccctgagcgcatcaagttcattgaggaaaaccacgagaacatcatggcttgcgctaagtctccactggagaacacttggtgggctgagcaagatagtccgttctgcttccttgcgttctgctttgagtacgctggggtacagcaccacggcctgagctataactgctcccttccgctggcgtttgacgggtcttgctctggcatccagcacttctccgcgatgctccgagatgaggtaggtggtcgcgcggttaacttgcttcctagtgaaaccgttcaggacatctacgggattgttgctaagaaagtcaacgagattctacaagcagacgcaatcaatgggaccgataacgaagtagttaccgtgaccgatgagaacgaaggtgaaatctctgagaaagtcaagctgggcactaaggcactggctggtcaatggctggcttacggtgttactcgcagtgtgactaagcgttcagtcatgacgctggcttacgggtccaaagagttcggcttccgtcaacaagtgctgcgccacactattcagccagctattgattccggcaagggtctgatgttcactcagccgaatcaggctgctggatacatggctaagctgatttgggaatctgtgagcgtgacggtggtagctgcggttgaagcaatgaactggcttaagtctgctgctaagctgctggctgctgaggtcaaagataagaagactggagagattcttcgcaagcgttgcgctgtgcattgggtaactcctgatggtttccctgtgtggcaggaatacaagaagcctattcagacgcgcttgaacctgatgttcctcggtcagttccgcttacagcctaccattaacaccaacaaagatagcgagattgatgcacataaacaggagtctggtatcgctcctaactttgtacacagccaagacggtagccaccttcgtaagactgtagtgtgggcacacgagaagtacggaatcgaatcttttgcactgattcacgactccttcggtaccattccggctgacgctgcgaacctgttcaaagcagtgcgcgaaactatggttgacacatatgagtcttgtgatgtactggctgatttctacgaccagttcgctgaccagttgcacgagtctcaattggacaaaatgccagcacttccggctaaaggtaacttgaacctccgtgacatcttagagtcggacttcgcgttcgcg

SEQ ID NO: 650 - protein, 890 aa, synthetic construct
  REGION 1..890: note = Variant of RNA polymerase
MHHHHHHMNTINIAKNDFSDIELAAIPFNTLADHYGEGLAREQLALEHESYEMGEARFRKMFERQLKAGEVADNAAASPLITTLLPKMIARINDWFEEVKAKRGKRPTAFQFLQEIKPEAVAYITIKTTLACLTSADRTTVQAVASAIGRAIEDEARFGRIRDLEAKHFLKNVEEQLNKRVGHVYKKAFMQVVEADMLSKGLLGGEAWSSWHKEDSIHVGVRCIEMLIESTGMVSLHRQNAGVVGKDSETIELAPEYAEAIATRAGALAGISPMFQPCVVPPKPWTGITGGGYWANGRRPLALVRTHSKKGLMRYEDVYMPEVYKAINIAQNTAWSINKWVLAVANVITKWKHCPVEDIPAIEREELPMKPEDIDMNPEALTAWKRAKAAVYRKDKARKSRRILLEFMLEQANKFANHKAIWFPYNMDWRGRVYAVSMFNPQGNDMTKGLLTLAKGKPIGKEGYYWLKIHGANCAGVDKVPFPERIKFIEENHENIMACAKSPLENTWWAEQDSPFCFLAFCFEYAGVQHHGLSYNCSLPLAFDGSCSGIQHFSAMLRDEVGGRAVNLLPSETVQDIYGIVAKKVNEILQADAINGTDNEVVTVTDENEGEISEKVKLGTKALAGQWLAYGVTRSVTKRSVMTLAYGSKEFGFRQQVLRHTIQPAIDSGKGLMFTQPNQAAGYMAKLIWESVSVTVVAAVEAMNWLKSAAKLLAAEVKDKKTGEILRKRCAVHWVTPDGFPVWQEYKKPIQTRLNLMFLGQFRLQPTINTNKDSEIDAHKQESGIAPNFVHSQDGSHLRKTVVWAHEKYGIESFALIHDSFGTIPADAANLFKAVRETMVDTYESCDVLADFYDQFADQLHESQLDKMPALPAKGNLNLRDILESDFAFA

SEQ ID NO: 651 - DNA, 2670 bp, synthetic construct
  misc_feature 1..2670: note = Variant of RNA polymerase
  source 1..2670: mol_type = other DNA
atgcaccatcaccatcaccatatgaacacgattaacatcgctaagaacgacttctctgacatcgaactggctgctatcccgttcaacactctggctgaccattacggtgagggtttagctcgcgaacagttggcccttgagcatgagtcttacgagatgggtgaagttcgtttccgcaagatgtttgagcgtcaacttaaagctggtgaggttgcggataacgctgccgccaagcctctcatcactaccctactccctaagatgattgcacgcatcaacgactggtttgaggaagtgaaagctaagcgcggcaagcgcccgacagccttccagttcctgcaagaaatcaagccggaagccgtagcgtacatcaccattaagaccactctggcttgcctaaccagtgcggaccgtacaaccgttcaggctgtagcaagcgcaatcggtcgggccattgaggacgaggctcgcttcggtcgtatccgtgaccttgaagctaagcacttcctgaaaaacgttgaggaacaactcaacaagcgcgtagggcacgtctacaagaaagcatttatgcaagttgtcgaggctgacatgctctctaagggtctactcggtggcgaggcgtggtcttcgtggcataaggaagactctattcatgtaggagtacgctgcatcgagatgctcattgagtcaaccggaatggttagcttacaccgccaaaatgctggcgtagtaggtaaagactctgagactatcgaactcgcacctgaatacgctgaggctatcgcaacccgtgcaggtgcgctggctggcatctctccgatgttccaaccttgcgtagttcctcctaagccgtggactggcattactggtggtggctattgggctaacggtcgtcgtcctctggcgctggtgcgtactcacagtaagaaaggtctgatgcgctacgaagacgtttacatgcctgaggtgtacaaagcgattaacattgcgcaaaacaccgcctggtcgatcaacaagtgggtcctggcggtcgccaacgtaatcaccaagtggaagcattgtccggtcgaggacatccctgcgattgagcgtgaagaactcccgatgaaaccggaagacatcgacatgaatcctgaggctctcaccgcgtggaaacgtgctaaagctgctgtgtaccgcaaggacaaggctcgcaagtctcgccgtatcttgcttgagttcatgcttgagcaagccaataagtttgctaaccataaggccatctggttcccttacaacatggactggcgcggtcgtgtttacgctgtgtcaatgttcaacccgcaaggtaacgatatgaccaaaggactgcttacgctggcgaaaggtaaaccaatcggtaaggaaggttactactggctgaaaatccacggtgcaaactgtgcgggtgtcgataaggttccgttccctgagcgcatcaagttcattgaggaaaaccacgagaacatcatggcttgcgctaagtctccactggagaacacttggtgggctgagcaagatagtccgttctgcttccttgcgttctgctttgagtacgctggggtacagcaccacggcctgagctataactgctcccttccgctggcgtttgacgggtcttgctctggcatccagcacttctccgcgatgctccgagatgaggtaggtggtcgcgcggttaacttgcttcctagtgaaaccgttcaggacatctacgggattgttgctaagaaagtcaacgagattctacaagcagacgcaatcaatgggaccgataacgaagtagttaccgtgaccgatgagaacgaaggtgaaatctctgagaaagtcaagctgggcactaaggcactggctggtcaatggctggcttacggtgttactcgcagtgtgactaagcgttcagtcatgacgctggcttacgggtccaaagagttcggcttccgtcaacaagtgctgcgccacactattcagccagctattgattccggcaagggtctgatgttcactcagccgaatcaggctgctggatacatggctaagctgatttgggaatctgtgagcgtgacggtggtagctgcggttgaagcaatgaactggcttaagtctgctgctaagctgctggctgctgaggtcaaagataagaagactggagagattcttcgcaagcgttgcgctgtgcattgggtaactcctgatggtttccctgtgtggcaggaatacaagaagcctattcagacgcgcttgaacctgatgttcctcggtcagttccgcttacagcctaccattaacaccaacaaagatagcgagattgatgcacataaacaggagtctggtatcgctcctaactttgtacacagccaagacggtagccaccttcgtaagactgtagtgtgggcacacgagaagtacggaatcgaatcttttgcactgattcacgactccttcggtaccattccggctgacgctgcgaacctgttcaaagcagtgcgcgaaactatggttgacacatatgagtcttgtgatgtactggctgatttctacgaccagttcgctgaccagttgcacgagtctcaattggacaaaatgccagcacttccggctaaaggtaacttgaacctccgtgacatcttagagtcggacttcgcgttcgcg

SEQ ID NO: 652 - protein, 890 aa, synthetic construct
  REGION 1..890: note = Variant of RNA polymerase
MHHHHHHMNTINIAKNDFSDIELAAIPFNTLADHYGEGLAREQLALEHESYEMGEVRFRKMFERQLKAGEVADNAAAKPLITTLLPKMIARINDWFEEVKAKRGKRPTAFQFLQEIKPEAVAYITIKTTLACLTSADRTTVQAVASAIGRAIEDEARFGRIRDLEAKHFLKNVEEQLNKRVGHVYKKAFMQVVEADMLSKGLLGGEAWSSWHKEDSIHVGVRCIEMLIESTGMVSLHRQNAGVVGKDSETIELAPEYAEAIATRAGALAGISPMFQPCVVPPKPWTGITGGGYWANGRRPLALVRTHSKKGLMRYEDVYMPEVYKAINIAQNTAWSINKWVLAVANVITKWKHCPVEDIPAIEREELPMKPEDIDMNPEALTAWKRAKAAVYRKDKARKSRRILLEFMLEQANKFANHKAIWFPYNMDWRGRVYAVSMFNPQGNDMTKGLLTLAKGKPIGKEGYYWLKIHGANCAGVDKVPFPERIKFIEENHENIMACAKSPLENTWWAEQDSPFCFLAFCFEYAGVQHHGLSYNCSLPLAFDGSCSGIQHFSAMLRDEVGGRAVNLLPSETVQDIYGIVAKKVNEILQADAINGTDNEVVTVTDENEGEISEKVKLGTKALAGQWLAYGVTRSVTKRSVMTLAYGSKEFGFRQQVLRHTIQPAIDSGKGLMFTQPNQAAGYMAKLIWESVSVTVVAAVEAMNWLKSAAKLLAAEVKDKKTGEILRKRCAVHWVTPDGFPVWQEYKKPIQTRLNLMFLGQFRLQPTINTNKDSEIDAHKQESGIAPNFVHSQDGSHLRKTVVWAHEKYGIESFALIHDSFGTIPADAANLFKAVRETMVDTYESCDVLADFYDQFADQLHESQLDKMPALPAKGNLNLRDILESDFAFA

SEQ ID NO: 653 - DNA, 2670 bp, synthetic construct
  misc_feature 1..2670: note = Variant of RNA polymerase
  source 1..2670: mol_type = other DNA
atgcaccatcaccatcaccatatgaacacgattaacatcgctaagaacgacttctctgacatcgaactggctgctatcccgttcaacactctggctgaccattacggtgagggtttagctcgcgaacagttggcccttgagcatgagtcttacgagatgggtgaagcacgtttccgcaagatgtttgagcgtcaacttaaagctggtgaggttgcggataacgctgccgccaagcctctcatcactaccctactccctaagatgattgcacgcatcaacgactggtttgaggaagtgaaagctaagcgcggcaagcgcccgacagccttccagttcctgcaagaaatcaagccggaagccgtagcgtacatcaccattaagaccactctggcttgcctaaccagtgcggaccgtacaaccgttcaggctgtagcaagcgcaatcggtcgggccattgaggacgaggctcgcttcggtcgtatccgtgaccttgaagctaagcacttcctgaaaaacgttgaggaacaactcaacaagcgcgtagggcacgtctacaagaaagcatttatgcaagttgtcgaggctgacatgctctctaagggtctactcggtggcgaggcgtggtcttcgtggcataaggaagactctattcatgtaggagtacgctgcatcgagatgctcattgagtcaaccggaatggttagcttacaccgccaaaatgctggcgtagtaggtaaagactctgagactatcgaactcgcacctgaatacgctgaggctatcgcaacccgtgcaggtgcgctggctggcatctctccgatgttccaaccttgcgtagttcctcctaagccgtggactggcattactggtggtggctattgggctaacggtcgtcgtcctctggcgctggtgcgtactcacagtaagaaaggtctgatgcgctacgaagacgtttacatgcctgaggtgtacaaagcgattaacattgcgcaaaacaccgcctggtcgatcaacaagtgggtcctggcggtcgccaacgtaatcaccaagtggaagcattgtccggtcgaggacatccctgcgattgagcgtgaagaactcccgatgaaaccggaagacatcgacatgaatcctgaggctctcaccgcgtggaaacgtgctaaagctgctgtgtaccgcaaggacaaggctcgcaagtctcgccgtatcttgcttgagttcatgcttgagcaagccaataagtttgctaaccataaggccatctggttcccttacaacatggactggcgcggtcgtgtttacgctgtgtcaatgttcaacccgcaaggtaacgatatgaccaaaggactgcttacgctggcgaaaggtaaaccaatcggtaaggaaggttactactggctgaaaatccacggtgcaaactgtgcgggtgtcgataaggttccgttccctgagcgcatcaagttcattgaggaaaaccacgagaacatcatggcttgcgctaagtctccactggagaacacttggtgggctgagcaagatagtccgttctgcttccttgcgttctgctttgagtacgctggggtacagcaccacggcctgagctataactgctcccttccgctggcgtttgacgggtcttgctctggcatccagcacttctccgcgatgctccgagatgaggtaggtggtcgcgcggttaacttgcttcctagtgaaaccgttcaggacatctacgggattgttgctaagaaagtcaacgagattctacaagcagacgcaatcaatgggaccgataacgaagtagttaccgtgaccgatgagaacgaaggtgaaatctctgagaaagtcaagctgggcactaaggcactggctggtcaatggctgcggtacggtgttactcgcagtgtgactaagcgttcagtcatgacgctggcttacgggtccaaagagttcggcttccgtcaacaagtgctgcgccacactattcagccagctattgattccggcaagggtctgatgttcactcagccgaatcaggctgctggatacatggctaagctgatttgggaatctgtgagcgtgacggtggtagctgcggttgaagcaatgaactggcttaagtctgctgctaagctgctggctgctgaggtcaaagataagaagactggagagattcttcgcaagcgttgcgctgtgcattgggtaactcctgatggtttccctgtgtggcaggaatacaagaagcctattcagacgcgcttgaacctgatgttcctcggtcagttccgcttacagcctaccattaacaccaacaaagatagcgagattgatgcacataaacaggagtctggtatcgctcctaactttgtacacagccaagacggtagccaccttcgtaagactgtagtgtgggcacacgagaagtacggaatcgaatcttttgcactgattcacgactccttcggtaccattccggctgacgctgcgaacctgttcaaagcagtgcgcgaaactatggttgacacatatgagtcttgtgatgtactggctgatttctacgaccagttcgctgaccagttgcacgagtctcaattggacaaaatgccagcacttccggctaaaggtaacttgaacctccgtgacatcttagagtcggacttcgcgttcgcg

SEQ ID NO: 654 - protein, 890 aa, synthetic construct
  REGION 1..890: note = Variant of RNA polymerase
MHHHHHHMNTINIAKNDFSDIELAAIPFNTLADHYGEGLAREQLALEHESYEMGEARFRKMFERQLKAGEVADNAAAKPLITTLLPKMIARINDWFEEVKAKRGKRPTAFQFLQEIKPEAVAYITIKTTLACLTSADRTTVQAVASAIGRAIEDEARFGRIRDLEAKHFLKNVEEQLNKRVGHVYKKAFMQVVEADMLSKGLLGGEAWSSWHKEDSIHVGVRCIEMLIESTGMVSLHRQNAGVVGKDSETIELAPEYAEAIATRAGALAGISPMFQPCVVPPKPWTGITGGGYWANGRRPLALVRTHSKKGLMRYEDVYMPEVYKAINIAQNTAWSINKWVLAVANVITKWKHCPVEDIPAIEREELPMKPEDIDMNPEALTAWKRAKAAVYRKDKARKSRRILLEFMLEQANKFANHKAIWFPYNMDWRGRVYAVSMFNPQGNDMTKGLLTLAKGKPIGKEGYYWLKIHGANCAGVDKVPFPERIKFIEENHENIMACAKSPLENTWWAEQDSPFCFLAFCFEYAGVQHHGLSYNCSLPLAFDGSCSGIQHFSAMLRDEVGGRAVNLLPSETVQDIYGIVAKKVNEILQADAINGTDNEVVTVTDENEGEISEKVKLGTKALAGQWLRYGVTRSVTKRSVMTLAYGSKEFGFRQQVLRHTIQPAIDSGKGLMFTQPNQAAGYMAKLIWESVSVTVVAAVEAMNWLKSAAKLLAAEVKDKKTGEILRKRCAVHWVTPDGFPVWQEYKKPIQTRLNLMFLGQFRLQPTINTNKDSEIDAHKQESGIAPNFVHSQDGSHLRKTVVWAHEKYGIESFALIHDSFGTIPADAANLFKAVRETMVDTYESCDVLADFYDQFADQLHESQLDKMPALPAKGNLNLRDILESDFAFA

SEQ ID NO: 655 - DNA, 2670 bp, synthetic construct
  misc_feature 1..2670: note = Variant of RNA polymerase
  source 1..2670: mol_type = other DNA
atgcaccatcaccatcaccatatgaacacgattaacatcgctaagaacgacttctctgacatcgaactggctgctatcccgttcaacactctggctgaccattacggtgagggtttagctcgcgaacagttggcccttgagcatgagtcttacgagatgggtgaagcacgtttccgcaagatgtttgagcgtcaacttaaagctggtgaggttgcggataacgctgccgccaagcctctcatcactaccctactccctaagatgattgcacgcatcaacgactggtttgaggaagtgaaagctaagcgcggcaagcgcccgacagccttccagttcctgcaagaaatcaagccggaagccgtagcgtacatcaccattaagaccactctggcttgcctaaccagtgcggaccgtacaaccgttcaggctgtagcaagcgcaatcggtcgggccattgaggacgaggctcgcttcggtcgtatccgtgaccttgaagctaagcacttcctgaaaaacgttgaggaacaactcaacaagcgcgtagggcacgtctacaagaaagcatttatgcaagttgtcgaggctgacatgctctctaagggtctactcggtggcgaggcgtggtcttcgtggcataaggaagactctattcatgtaggagtacgctgcatcgagatgctcattgagtcaaccggaatggttagcttacaccgccaaaatgctggcgtagtaggtaaagactctgagactatcgaactcgcacctgaatacgctgaggctatcgcaacccgtgcaggtgcgctggctggcatctctccgatgttccaaccttgcgtagttcctcctaagccgtggactggcattactggtggtggctattgggctaacggtcgtcgtcctctggcgctggtgcgtactcacagtaagaaaggtctgatgcgctacgaagacgtttacatgcctgaggtgtacaaagcgattaacattgcgcaaaacaccgcctggtcgatcaacaagtgggtcctggcggtcgccaacgtaatcaccaagtggaagcattgtccggtcgaggacatccctgcgattgagcgtgaagaactcccgatgaaaccggaagacatcgacatgaatcctgaggctctcaccgcgtggaaacgtgctaaagctgctgtgtaccgcaaggacaaggctcgcaagtctcgccgtatcttgcttgagttcatgcttgagcaagccaataagtttgctaaccataaggccatctggttcccttacaacatggactggcgcggtcgtgtttacgctgtgtcaatgttcaacccgcaaggtaacgatatgaccaaaggactgcttacgctggcgaaaggtaaaccaatcggtaaggaaggttactactggctgaaaatccacggtgcaaactgtgcgggtgtcgataaggttccgttccctgagcgcatcaagttcattgaggaaaaccacgagaacatcatggcttgcgctaagtctccactggagaacacttggtgggctgagcaagatagtccgttctgcttccttgcgttctgctttgagtacgctggggtacagcaccacggcctgagctataactgctcccttccgctggcgtttgacgggtcttgctctggcatccagcacttctccgcgatgctccgagatgaggtaggtggtcgcgcggttaacttgcttcctagtgaaaccgttcaggacatctacgggattgttgctaagaaagtcaacgagattctacaagcagacgcaatcaatgggaccaggaacgaagtagttaccgtgaccgatgagaacgaaggtgaaatctctgagaaagtcaagctgggcactaaggcactggctggtcaatggctggcttacggtgttactcgcagtgtgactaagcgttcagtcatgacgctggcttacgggtccaaagagttcggcttccgtcaacaagtgctgcgccacactattcagccagctattgattccggcaagggtctgatgttcactcagccgaatcaggctgctggatacatggctaagctgatttgggaatctgtgagcgtgacggtggtagctgcggttgaagcaatgaactggcttaagtctgctgctaagctgctggctgctgaggtcaaagataagaagactggagagattcttcgcaagcgttgcgctgtgcattgggtaactcctgatggtttccctgtgtggcaggaatacaagaagcctattcagacgcgcttgaacctgatgttcctcggtcagttccgcttacagcctaccattaacaccaacaaagatagcgagattgatgcacataaacaggagtctggtatcgctcctaactttgtacacagccaagacggtagccaccttcgtaagactgtagtgtgggcacacgagaagtacggaatcgaatcttttgcactgattcacgactccttcggtaccattccggctgacgctgcgaacctgttcaaagcagtgcgcgaaactatggttgacacatatgagtcttgtgatgtactggctgatttctacgaccagttcgctgaccagttgcacgagtctcaattggacaaaatgccagcacttccggctaaaggtaacttgaacctccgtgacatcttagagtcggacttcgcgttcgcg

SEQ ID NO: 656 - protein, 890 aa, synthetic construct
  REGION 1..890: note = Variant of RNA polymerase
MHHHHHHMNTINIAKNDFSDIELAAIPFNTLADHYGEGLAREQLALEHESYEMGEARFRKMFERQLKAGEVADNAAAKPLITTLLPKMIARINDWFEEVKAKRGKRPTAFQFLQEIKPEAVAYITIKTTLACLTSADRTTVQAVASAIGRAIEDEARFGRIRDLEAKHFLKNVEEQLNKRVGHVYKKAFMQVVEADMLSKGLLGGEAWSSWHKEDSIHVGVRCIEMLIESTGMVSLHRQNAGVVGKDSETIELAPEYAEAIATRAGALAGISPMFQPCVVPPKPWTGITGGGYWANGRRPLALVRTHSKKGLMRYEDVYMPEVYKAINIAQNTAWSINKWVLAVANVITKWKHCPVEDIPAIEREELPMKPEDIDMNPEALTAWKRAKAAVYRKDKARKSRRILLEFMLEQANKFANHKAIWFPYNMDWRGRVYAVSMFNPQGNDMTKGLLTLAKGKPIGKEGYYWLKIHGANCAGVDKVPFPERIKFIEENHENIMACAKSPLENTWWAEQDSPFCFLAFCFEYAGVQHHGLSYNCSLPLAFDGSCSGIQHFSAMLRDEVGGRAVNLLPSETVQDIYGIVAKKVNEILQADAINGTRNEVVTVTDENEGEISEKVKLGTKALAGQWLAYGVTRSVTKRSVMTLAYGSKEFGFRQQVLRHTIQPAIDSGKGLMFTQPNQAAGYMAKLIWESVSVTVVAAVEAMNWLKSAAKLLAAEVKDKKTGEILRKRCAVHWVTPDGFPVWQEYKKPIQTRLNLMFLGQFRLQPTINTNKDSEIDAHKQESGIAPNFVHSQDGSHLRKTVVWAHEKYGIESFALIHDSFGTIPADAANLFKAVRETMVDTYESCDVLADFYDQFADQLHESQLDKMPALPAKGNLNLRDILESDFAFA

SEQ ID NO: 657 - DNA, 2670 bp, synthetic construct
  misc_feature 1..2670: note = Variant of RNA polymerase
  source 1..2670: mol_type = other DNA
atgcaccatcaccatcaccatatgaacacgattaacatcgctaagaacgacttctctgacatcgaactggctgctatcccgttcaacactctggctgaccattacggtgagggtttagctcgcgaacagttggcccttgagcatgagtcttacgagatgggtgaagcacgtttccgcaagatgttttcgcgtcaacttaaagctggtgaggttgcggataacgctgccgccaagcctctcatcactaccctactccctaagatgattgcacgcatcaacgactggtttgaggaagtgaaagctaagcgcggcaagcgcccgacagccttccagttcctgcaagaaatcaagccggaagccgtagcgtacatcaccattaagaccactctggcttgcctaaccagtgcggaccgtacaaccgttcaggctgtagcaagcgcaatcggtcgggccattgaggacgaggctcgcttcggtcgtatccgtgaccttgaagctaagcacttcctgaaaaacgttgaggaacaactcaacaagcgcgtagggcacgtctacaagaaagcatttatgcaagttgtcgaggctgacatgctctctaagggtctactcggtggcgaggcgtggtcttcgtggcataaggaagactctattcatgtaggagtacgctgcatcgagatgctcattgagtcaaccggaatggttagcttacaccgccaaaatgctggcgtagtaggtaaagactctgagactatcgaactcgcacctgaatacgctgaggctatcgcaacccgtgcaggtgcgctggctggcatctctccgatgttccaaccttgcgtagttcctcctaagccgtggactggcattactggtggtggctattgggctaacggtcgtcgtcctctggcgctggtgcgtactcacagtaagaaaggtctgatgcgctacgaagacgtttacatgcctgaggtgtacaaagcgattaacattgcgcaaaacaccgcctggtcgatcaacaagtgggtcctggcggtcgccaacgtaatcaccaagtggaagcattgtccggtcgaggacatccctgcgattgagcgtgaagaactcccgatgaaaccggaagacatcgacatgaatcctgaggctctcaccgcgtggaaacgtgctaaagctgctgtgtaccgcaaggacaaggctcgcaagtctcgccgtatcttgcttgagttcatgcttgagcaagccaataagtttgctaaccataaggccatctggttcccttacaacatggactggcgcggtcgtgtttacgctgtgtcaatgttcaacccgcaaggtaacgatatgaccaaaggactgcttacgctggcgaaaggtaaaccaatcggtaaggaaggttactactggctgaaaatccacggtgcaaactgtgcgggtgtcgataaggttccgttccctgagcgcatcaagttcattgaggaaaaccacgagaacatcatggcttgcgctaagtctccactggagaacacttggtgggctgagcaagatagtccgttctgcttccttgcgttctgctttgagtacgctggggtacagcaccacggcctgagctataactgctcccttccgctggcgtttgacgggtcttgctctggcatccagcacttctccgcgatgctccgagatgaggtaggtggtcgcgcggttaacttgcttcctagtgaaaccgttcaggacatctacgggattgttgctaagaaagtcaacgagattctacaagcagacgcaatcaatgggaccgataacgaagtagttaccgtgaccgatgagaacgaaggtgaaatctctgagaaagtcaagctgggcactaaggcactggctggtcaatggctggcttacggtgttactcgcagtgtgactaagcgttcagtcatgacgctggcttacgggtccaaagagttcggcttccgtcaacaagtgctgcgccacactattcagccagctattgattccggcaagggtctgatgttcactcagccgaatcaggctgctggatacatggctaagctgatttgggaatctgtgagcgtgacggtggtagctgcggttgaagcaatgaactggcttaagtctgctgctaagctgctggctgctgaggtcaaagataagaagactggagagattcttcgcaagcgttgcgctgtgcattgggtaactcctgatggtttccctgtgtggcaggaatacaagaagcctattcagacgcgcttgaacctgatgttcctcggtcagttccgcttacagcctaccattaacaccaacaaagatagcgagattgatgcacataaacaggagtctggtatcgctcctaactttgtacacagccaagacggtagccaccttcgtaagactgtagtgtgggcacacgagaagtacggaatcgaatcttttgcactgattcacgactccttcggtaccattccggctgacgctgcgaacctgttcaaagcagtgcgcgaaactatggttgacacatatgagtcttgtgatgtactggctgatttctacgaccagttcgctgaccagttgcacgagtctcaattggacaaaatgccagcacttccggctaaaggtaacttgaacctccgtgacatcttagagtcggacttcgcgttcgcg

SEQ ID NO: 658 - protein, 890 aa, synthetic construct
  REGION 1..890: note = Variant of RNA polymerase
MHHHHHHMNTINIAKNDFSDIELAAIPFNTLADHYGEGLAREQLALEHESYEMGEARFRKMFSRQLKAGEVADNAAAKPLITTLLPKMIARINDWFEEVKAKRGKRPTAFQFLQEIKPEAVAYITIKTTLACLTSADRTTVQAVASAIGRAIEDEARFGRIRDLEAKHFLKNVEEQLNKRVGHVYKKAFMQVVEADMLSKGLLGGEAWSSWHKEDSIHVGVRCIEMLIESTGMVSLHRQNAGVVGKDSETIELAPEYAEAIATRAGALAGISPMFQPCVVPPKPWTGITGGGYWANGRRPLALVRTHSKKGLMRYEDVYMPEVYKAINIAQNTAWSINKWVLAVANVITKWKHCPVEDIPAIEREELPMKPEDIDMNPEALTAWKRAKAAVYRKDKARKSRRILLEFMLEQANKFANHKAIWFPYNMDWRGRVYAVSMFNPQGNDMTKGLLTLAKGKPIGKEGYYWLKIHGANCAGVDKVPFPERIKFIEENHENIMACAKSPLENTWWAEQDSPFCFLAFCFEYAGVQHHGLSYNCSLPLAFDGSCSGIQHFSAMLRDEVGGRAVNLLPSETVQDIYGIVAKKVNEILQADAINGTDNEVVTVTDENEGEISEKVKLGTKALAGQWLAYGVTRSVTKRSVMTLAYGSKEFGFRQQVLRHTIQPAIDSGKGLMFTQPNQAAGYMAKLIWESVSVTVVAAVEAMNWLKSAAKLLAAEVKDKKTGEILRKRCAVHWVTPDGFPVWQEYKKPIQTRLNLMFLGQFRLQPTINTNKDSEIDAHKQESGIAPNFVHSQDGSHLRKTVVWAHEKYGIESFALIHDSFGTIPADAANLFKAVRETMVDTYESCDVLADFYDQFADQLHESQLDKMPALPAKGNLNLRDILESDFAFA

SEQ ID NO: 659 - DNA, 2670 bp, synthetic construct
  misc_feature 1..2670: note = Variant of RNA polymerase
  source 1..2670: mol_type = other DNA
atgcaccatcaccatcaccatatgaacacgattaacatcgctaagaacgacttctctgacatcgaactggctgctatcccgttcaacactctggctgaccattacggtgagggtttagctcgcgaacagttggcccttgagcatgagtcttacgagatgggtgaagcacgtttccgcaagatgtttgagcgtcaacttaaagctggtgaggttgcggataacgctgccgccaagcctctcatcagtaccctactccctaagatgattgcacgcatcaacgactggtttgaggaagtgaaagctaagcgcggcaagcgcccgacagccttccagttcctgcaagaaatcaagccggaagccgtagcgtacatcaccattaagaccactctggcttgcctaaccagtgcggaccgtacaaccgttcaggctgtagcaagcgcaatcggtcgggccattgaggacgaggctcgcttcggtcgtatccgtgaccttgaagctaagcacttcctgaaaaacgttgaggaacaactcaacaagcgcgtagggcacgtctacaagaaagcatttatgcaagttgtcgaggctgacatgctctctaagggtctactcggtggcgaggcgtggtcttcgtggcataaggaagactctattcatgtaggagtacgctgcatcgagatgctcattgagtcaaccggaatggttagcttacaccgccaaaatgctggcgtagtaggtaaagactctgagactatcgaactcgcacctgaatacgctgaggctatcgcaacccgtgcaggtgcgctggctggcatctctccgatgttccaaccttgcgtagttcctcctaagccgtggactggcattactggtggtggctattgggctaacggtcgtcgtcctctggcgctggtgcgtactcacagtaagaaaggtctgatgcgctacgaagacgtttacatgcctgaggtgtacaaagcgattaacattgcgcaaaacaccgcctggtcgatcaacaagtgggtcctggcggtcgccaacgtaatcaccaagtggaagcattgtccggtcgaggacatccctgcgattgagcgtgaagaactcccgatgaaaccggaagacatcgacatgaatcctgaggctctcaccgcgtggaaacgtgctaaagctgctgtgtaccgcaaggacaaggctcgcaagtctcgccgtatcttgcttgagttcatgcttgagcaagccaataagtttgctaaccataaggccatctggttcccttacaacatggactggcgcggtcgtgtttacgctgtgtcaatgttcaacccgcaaggtaacgatatgaccaaaggactgcttacgctggcgaaaggtaaaccaatcggtaaggaaggttactactggctgaaaatccacggtgcaaactgtgcgggtgtcgataaggttccgttccctgagcgcatcaagttcattgaggaaaaccacgagaacatcatggcttgcgctaagtctccactggagaacacttggtgggctgagcaagatagtccgttctgcttccttgcgttctgctttgagtacgctggggtacagcaccacggcctgagctataactgctcccttccgctggcgtttgacgggtcttgctctggcatccagcacttctccgcgatgctccgagatgaggtaggtggtcgcgcggttaacttgcttcctagtgaaaccgttcaggacatctacgggattgttgctaagaaagtcaacgagattctacaagcagacgcaatcaatgggaccgataacgaagtagttaccgtgaccgatgagaacgaaggtgaaatctctgagaaagtcaagctgggcactaaggcactggctggtcaatggctggcttacggtgttactcgcagtgtgactaagcgttcagtcatgacgctggcttacgggtccaaagagttcggcttccgtcaacaagtgctgcgccacactattcagccagctattgattccggcaagggtctgatgttcactcagccgaatcaggctgctggatacatggctaagctgatttgggaatctgtgagcgtgacggtggtagctgcggttgaagcaatgaactggcttaagtctgctgctaagctgctggctgctgaggtcaaagataagaagactggagagattcttcgcaagcgttgcgctgtgcattgggtaactcctgatggtttccctgtgtggcaggaatacaagaagcctattcagacgcgcttgaacctgatgttcctcggtcagttccgcttacagcctaccattaacaccaacaaagatagcgagattgatgcacataaacaggagtctggtatcgctcctaactttgtacacagccaagacggtagccaccttcgtaagactgtagtgtgggcacacgagaagtacggaatcgaatcttttgcactgattcacgactccttcggtaccattccggctgacgctgcgaacctgttcaaagcagtgcgcgaaactatggttgacacatatgagtcttgtgatgtactggctgatttctacgaccagttcgctgaccagttgcacgagtctcaattggacaaaatgccagcacttccggctaaaggtaacttgaacctccgtgacatcttagagtcggacttcgcgttcgcg

SEQ ID NO: 660 - protein, 890 aa, synthetic construct
  REGION 1..890: note = Variant of RNA polymerase
MHHHHHHMNTINIAKNDFSDIELAAIPFNTLADHYGEGLAREQLALEHESYEMGEARFRKMFERQLKAGEVADNAAAKPLISTLLPKMIARINDWFEEVKAKRGKRPTAFQFLQEIKPEAVAYITIKTTLACLTSADRTTVQAVASAIGRAIEDEARFGRIRDLEAKHFLKNVEEQLNKRVGHVYKKAFMQVVEADMLSKGLLGGEAWSSWHKEDSIHVGVRCIEMLIESTGMVSLHRQNAGVVGKDSETIELAPEYAEAIATRAGALAGISPMFQPCVVPPKPWTGITGGGYWANGRRPLALVRTHSKKGLMRYEDVYMPEVYKAINIAQNTAWSINKWVLAVANVITKWKHCPVEDIPAIEREELPMKPEDIDMNPEALTAWKRAKAAVYRKDKARKSRRILLEFMLEQANKFANHKAIWFPYNMDWRGRVYAVSMFNPQGNDMTKGLLTLAKGKPIGKEGYYWLKIHGANCAGVDKVPFPERIKFIEENHENIMACAKSPLENTWWAEQDSPFCFLAFCFEYAGVQHHGLSYNCSLPLAFDGSCSGIQHFSAMLRDEVGGRAVNLLPSETVQDIYGIVAKKVNEILQADAINGTDNEVVTVTDENEGEISEKVKLGTKALAGQWLAYGVTRSVTKRSVMTLAYGSKEFGFRQQVLRHTIQPAIDSGKGLMFTQPNQAAGYMAKLIWESVSVTVVAAVEAMNWLKSAAKLLAAEVKDKKTGEILRKRCAVHWVTPDGFPVWQEYKKPIQTRLNLMFLGQFRLQPTINTNKDSEIDAHKQESGIAPNFVHSQDGSHLRKTVVWAHEKYGIESFALIHDSFGTIPADAANLFKAVRETMVDTYESCDVLADFYDQFADQLHESQLDKMPALPAKGNLNLRDILESDFAFA

SEQ ID NO: 661 - DNA, 2670 bp, synthetic construct
  misc_feature 1..2670: note = Variant of RNA polymerase
  source 1..2670: mol_type = other DNA
atgcaccatcaccatcaccatatgaacacgattaacatcgctaagaacgacttctctgacatcgaactggctgctatcccgttcaacactctggctgaccattacggtgagggtttagctcgcgaacagttggcccttgagcatgagtcttacgagatgggtgaagcacgtttccgcaagatgtttgagcgtcaacttaaagctggtgaggttgcggataacgctgccgccaagcctctcatcactaccctactccctaagatgattgcacgcatcaacgactggtttgaggaagtgaaagctaagcgcggcaagcgcccgacagccttccagttcctgcaagaaatcaagccggaagccgtagcgtacatcaccattaagaccactctggcttgcctaaccagtgcggaccgtacaaccgttcaggctgtagcaagcgcaatcggtcgggccattgaggacgaggctcgcttcggtcgtatccgtgaccttgaagctaagcacttcctgaaaaacgttgaggaacaactcaacaagcgcgtagggcacgtctacaagaaagcatttatgcaagttgtcgaggctgacatgctctctaagggtctactcggtggcgagtcttggtcttcgtggcataaggaagactctattcatgtaggagtacgctgcatcgagatgctcattgagtcaaccggaatggttagcttacaccgccaaaatgctggcgtagtaggtaaagactctgagactatcgaactcgcacctgaatacgctgaggctatcgcaacccgtgcaggtgcgctggctggcatctctccgatgttccaaccttgcgtagttcctcctaagccgtggactggcattactggtggtggctattgggctaacggtcgtcgtcctctggcgctggtgcgtactcacagtaagaaaggtctgatgcgctacgaagacgtttacatgcctgaggtgtacaaagcgattaacattgcgcaaaacaccgcctggtcgatcaacaagtgggtcctggcggtcgccaacgtaatcaccaagtggaagcattgtccggtcgaggacatccctgcgattgagcgtgaagaactcccgatgaaaccggaagacatcgacatgaatcctgaggctctcaccgcgtggaaacgtgctaaagctgctgtgtaccgcaaggacaaggctcgcaagtctcgccgtatcttgcttgagttcatgcttgagcaagccaataagtttgctaaccataaggccatctggttcccttacaacatggactggcgcggtcgtgtttacgctgtgtcaatgttcaacccgcaaggtaacgatatgaccaaaggactgcttacgctggcgaaaggtaaaccaatcggtaaggaaggttactactggctgaaaatccacggtgcaaactgtgcgggtgtcgataaggttccgttccctgagcgcatcaagttcattgaggaaaaccacgagaacatcatggcttgcgctaagtctccactggagaacacttggtgggctgagcaagatagtccgttctgcttccttgcgttctgctttgagtacgctggggtacagcaccacggcctgagctataactgctcccttccgctggcgtttgacgggtcttgctctggcatccagcacttctccgcgatgctccgagatgaggtaggtggtcgcgcggttaacttgcttcctagtgaaaccgttcaggacatctacgggattgttgctaagaaagtcaacgagattctacaagcagacgcaatcaatgggaccgataacgaagtagttaccgtgaccgatgagaacgaaggtgaaatctctgagaaagtcaagctgggcactaaggcactggctggtcaatggctggcttacggtgttactcgcagtgtgactaagcgttcagtcatgacgctggcttacgggtccaaagagttcggcttccgtcaacaagtgctgcgccacactattcagccagctattgattccggcaagggtctgatgttcactcagccgaatcaggctgctggatacatggctaagctgatttgggaatctgtgagcgtgacggtggtagctgcggttgaagcaatgaactggcttaagtctgctgctaagctgctggctgctgaggtcaaagataagaagactggagagattcttcgcaagcgttgcgctgtgcattgggtaactcctgatggtttccctgtgtggcaggaatacaagaagcctattcagacgcgcttgaacctgatgttcctcggtcagttccgcttacagcctaccattaacaccaacaaagatagcgagattgatgcacataaacaggagtctggtatcgctcctaactttgtacacagccaagacggtagccaccttcgtaagactgtagtgtgggcacacgagaagtacggaatcgaatcttttgcactgattcacgactccttcggtaccattccggctgacgctgcgaacctgttcaaagcagtgcgcgaaactatggttgacacatatgagtcttgtgatgtactggctgatttctacgaccagttcgctgaccagttgcacgagtctcaattggacaaaatgccagcacttccggctaaaggtaacttgaacctccgtgacatcttagagtcggacttcgcgttcgcg

SEQ ID NO: 662 - protein, 890 aa, synthetic construct
  REGION 1..890: note = Variant of RNA polymerase
MHHHHHHMNTINIAKNDFSDIELAAIPFNTLADHYGEGLAREQLALEHESYEMGEARFRKMFERQLKAGEVADNAAAKPLITTLLPKMIARINDWFEEVKAKRGKRPTAFQFLQEIKPEAVAYITIKTTLACLTSADRTTVQAVASAIGRAIEDEARFGRIRDLEAKHFLKNVEEQLNKRVGHVYKKAFMQVVEADMLSKGLLGGESWSSWHKEDSIHVGVRCIEMLIESTGMVSLHRQNAGVVGKDSETIELAPEYAEAIATRAGALAGISPMFQPCVVPPKPWTGITGGGYWANGRRPLALVRTHSKKGLMRYEDVYMPEVYKAINIAQNTAWSINKWVLAVANVITKWKHCPVEDIPAIEREELPMKPEDIDMNPEALTAWKRAKAAVYRKDKARKSRRILLEFMLEQANKFANHKAIWFPYNMDWRGRVYAVSMFNPQGNDMTKGLLTLAKGKPIGKEGYYWLKIHGANCAGVDKVPFPERIKFIEENHENIMACAKSPLENTWWAEQDSPFCFLAFCFEYAGVQHHGLSYNCSLPLAFDGSCSGIQHFSAMLRDEVGGRAVNLLPSETVQDIYGIVAKKVNEILQADAINGTDNEVVTVTDENEGEISEKVKLGTKALAGQWLAYGVTRSVTKRSVMTLAYGSKEFGFRQQVLRHTIQPAIDSGKGLMFTQPNQAAGYMAKLIWESVSVTVVAAVEAMNWLKSAAKLLAAEVKDKKTGEILRKRCAVHWVTPDGFPVWQEYKKPIQTRLNLMFLGQFRLQPTINTNKDSEIDAHKQESGIAPNFVHSQDGSHLRKTVVWAHEKYGIESFALIHDSFGTIPADAANLFKAVRETMVDTYESCDVLADFYDQFADQLHESQLDKMPALPAKGNLNLRDILESDFAFA

SEQ ID NO: 663 - DNA, 2670 bp, synthetic construct
  misc_feature 1..2670: note = Variant of RNA polymerase
  source 1..2670: mol_type = other DNA
atgcaccatcaccatcaccatatgaacacgattaacatcgctaagaacgacttctctgacatcgaactggctgctatcccgttcaacactctggctgaccattacggtgagggtttagctcgcgaacagttggcccttgagcatgagtcttacgagatgggtgaagcacgtttccgcaagatgtttgagcgtcaacttaaagctggtgaggttgcggataacgctgccgccaagcctctcatcactaccctactccctaagatgattgcacgcatcaacgactggtttgaggaagtgaaagctaagcgcggcaagcgcccgacagccttccagttcctgcaagaaatcaagccggaagccgtagcgtacatcaccattaagaccactctggcttgcctaaccagtgcggaccgtacaaccgttcaggctgtagcaagcgcaatcggtcgggccattgaggacgaggctcgcttcggtcgtatccgtgaccttgaagctaagcacttcctgaaaaacgttgaggaacaactcaacaagcgcgtagggcacgtctacaagaaagcatttatgcaagttgtcgaggctgacatgctctctaagggtctactcggtggcgaggcgtggtcttcgtggcataaggaagactctattcatgtaggagtacgctgcatcgagatgctcattgagtcaaccggaatggttagcttacaccgccaaaatgctggcgtagtaggtaaagactctgagactatcgaactcgcacctgaatacgctgaggctatcgcaacccgtgcaggtgcgctggctggcatctctccgatgttccaaccttgcgtagttcctcctaagccgtggactggcattactggtggtggctattgggctaacggtcgtcgtcctctggcgctggtgcgtactcacagtaagaaaggtctgatgcgctacgaagacgtttacatgcctgaggtgtacaaagcgattaacattgcgcaaaacaccgcctggtcgatcaacaagtgggtcctggcggtcgccaacgtaatcaccaagtggaagcattgtccggtcgaggacatccctgcgattgagcgtgaagaactcccgatgaaaccggaagacatcgacatgaatcctgaggctctcaccgcgtggaaacgtgctaaagctgctgtgtaccgcaaggacaaggctcgcaagtctcgccgtatcttgcttgagttcatgcttgagcaagccaataagtttgctaaccataaggccatctggttcccttacaacatggactggcgcggtcgtgtttacgctgtgtcaatgttcaacccgcaaggtaacgatatgaccaaaggactgcttacgctggcgaaaggtaaaccaatcggtaaggaaggttactactggctgaaaatccacggtgcaaactgtgcgggtgtcgataaggttccgttccctgagcgcatcaagttcattgaggaaaaccacgagaacatcatggcttgcgctaagtctccactggagaacacttggtgggctgagcaagatagtccgttctgcttccttgcgttctgctttgagtacgctggggtacagcaccacggcctgagctataactgctcccttccgctggcgtttgacgggtcttgctctggcatccagcacttctccgcgatgctccgagatgaggtaggtggtcgcgcggttaacttgcttcctagtgaaaccgttcaggacatctacgggattgttgctaagaaagtcaacgagattctacaagcagacgcaatcaatgggaccgttaacgaagtagttaccgtgaccgatgagaacgaaggtgaaatctctgagaaagtcaagctgggcactaaggcactggctggtcaatggctggcttacggtgttactcgcagtgtgactaagcgttcagtcatgacgctggcttacgggtccaaagagttcggcttccgtcaacaagtgctgcgccacactattcagccagctattgattccggcaagggtctgatgttcactcagccgaatcaggctgctggatacatggctaagctgatttgggaatctgtgagcgtgacggtggtagctgcggttgaagcaatgaactggcttaagtctgctgctaagctgctggctgctgaggtcaaagataagaagactggagagattcttcgcaagcgttgcgctgtgcattgggtaactcctgatggtttccctgtgtggcaggaatacaagaagcctattcagacgcgcttgaacctgatgttcctcggtcagttccgcttacagcctaccattaacaccaacaaagatagcgagattgatgcacataaacaggagtctggtatcgctcctaactttgtacacagccaagacggtagccaccttcgtaagactgtagtgtgggcacacgagaagtacggaatcgaatcttttgcactgattcacgactccttcggtaccattccggctgacgctgcgaacctgttcaaagcagtgcgcgaaactatggttgacacatatgagtcttgtgatgtactggctgatttctacgaccagttcgctgaccagttgcacgagtctcaattggacaaaatgccagcacttccggctaaaggtaacttgaacctccgtgacatcttagagtcggacttcgcgttcgcg

SEQ ID NO: 664 - protein, 890 aa, synthetic construct
  REGION 1..890: note = Variant of RNA polymerase
MHHHHHHMNTINIAKNDFSDIELAAIPFNTLADHYGEGLAREQLALEHESYEMGEARFRKMFERQLKAGEVADNAAAKPLITTLLPKMIARINDWFEEVKAKRGKRPTAFQFLQEIKPEAVAYITIKTTLACLTSADRTTVQAVASAIGRAIEDEARFGRIRDLEAKHFLKNVEEQLNKRVGHVYKKAFMQVVEADMLSKGLLGGEAWSSWHKEDSIHVGVRCIEMLIESTGMVSLHRQNAGVVGKDSETIELAPEYAEAIATRAGALAGISPMFQPCVVPPKPWTGITGGGYWANGRRPLALVRTHSKKGLMRYEDVYMPEVYKAINIAQNTAWSINKWVLAVANVITKWKHCPVEDIPAIEREELPMKPEDIDMNPEALTAWKRAKAAVYRKDKARKSRRILLEFMLEQANKFANHKAIWFPYNMDWRGRVYAVSMFNPQGNDMTKGLLTLAKGKPIGKEGYYWLKIHGANCAGVDKVPFPERIKFIEENHENIMACAKSPLENTWWAEQDSPFCFLAFCFEYAGVQHHGLSYNCSLPLAFDGSCSGIQHFSAMLRDEVGGRAVNLLPSETVQDIYGIVAKKVNEILQADAINGTVNEVVTVTDENEGEISEKVKLGTKALAGQWLAYGVTRSVTKRSVMTLAYGSKEFGFRQQVLRHTIQPAIDSGKGLMFTQPNQAAGYMAKLIWESVSVTVVAAVEAMNWLKSAAKLLAAEVKDKKTGEILRKRCAVHWVTPDGFPVWQEYKKPIQTRLNLMFLGQFRLQPTINTNKDSEIDAHKQESGIAPNFVHSQDGSHLRKTVVWAHEKYGIESFALIHDSFGTIPADAANLFKAVRETMVDTYESCDVLADFYDQFADQLHESQLDKMPALPAKGNLNLRDILESDFAFA

SEQ ID NO: 665 - DNA, 2670 bp, synthetic construct
  misc_feature 1..2670: note = Variant of RNA polymerase
  source 1..2670: mol_type = other DNA
atgcaccatcaccatcaccatatgaacacgattaacatcgctaagaacgacttctctgacatcgaactggctgctatcccgttcaacactctggctgaccattacggtgagggtttagctcgcgaacagttggcccttgagcatgagtcttacgagatgggtgaagcacgtttccgcaagatgtttgagcgtcaacttaaagctggtgaggttgcggataacgctgccgccaagcctctcatcactaccctactccctaagatgattgcacgcatcaacgactggtttgaggaagtgaaagctaagcgcggcaagcgcccgacagccttccagttcctgcaagaaatcaagccggaagccgtagcgtacatcaccattaagaccactctggcttgcctaaccagtgcggaccgtacaaccgttcaggctgtagcaagcgcaatcggtcgggccattgaggacgaggctcgcttcggtcgtatccgtgaccttgaagctaagcacttcctgaaaaacgttgaggaacaactcaacaagcgcgtagggcacgtctacaagaaagcatttatgcaagttgtcgaggctgacatgctctctaagggtctactcggtggcgaggcgtggtcttcgtggcataaggaagactctattcatgtaggagtacgctgcatcgagatgctcattgagtcaaccggaatggttagcttacaccgccaaaatgctggcgtagtaggtaaagactctgagactatcgaactcgcacctgaatacgctgaggctatcgcaacccgtgcaggtgcgctggctggcatctctccgatgttccaaccttgcgtagttcctcctaagccgtggactggcattactggtggtggctattgggctaacggtcgtcgtcctctggcgctggtgcgtactcacagtaagaaaggtctgatgcgctacgaagacgtttacatgcctgaggtgtacaaagcgattaacattgcgcaaaacaccgcctggtcgatcaacaagtgggtcctggcggtcgccaacgtaatcaccaagtggaagcattgtccggtcgaggacatccctgcgattgagcgtgaagaactcccgatgaaaccggaagacatcgacatgaatcctgaggctctcaccgcgtggaaacgtgctaaagctgctgtgtaccgcaaggacaaggctcgcaagtctcgccgtatcttgcttgagttcatgcttgagcaagccaataagtttgctaaccataaggccatctggttcccttacaacatggactggcgcggtcgtgtttacgctgtgtcaatgttcaacccgcaaggtaacgatatgaccaaaggactgcttacgctggcgaaaggtaaaccaatcggtaaggaaggttactactggctgaaaatccacggtgcaaactgtgcgggtgtcgataaggttccgttccctgagcgcatcaagttcattgaggaaaaccacgagaacatcatggcttgcgctaagtctccactggagaacacttggtgggctgagcaagatagtccgttctgcttccttgcgttctgctttgagtacgctggggtacagcaccacggcctgagctataactgctcccttccgctggcgtttgacgggtcttgctctggcatccagcacttctccgcgatgctccgagatgaggtaggtggtcgcgcggttaacttgcttcctagtgaaaccgttcaggacatctacgggattgttgctaagaaagtcaacgagattctacaagcagacgcaatcaatgggaccgataacgaagtagttaccgtgaccgatgagaacgaaggtgaaatctctgagaaagtcaagctgggcactaaggcactggctggtcaatggctggcttacggtgttactcgcagtgtgactaagcgttcagtcatgacgctggcttacgggtccaaagagttcggcttccgtcaacaagtgctgcgccacactattcagccagctatggattccggcaagggtctgatgttcactcagccgaatcaggctgctggatacatggctaagctgatttgggaatctgtgagcgtgacggtggtagctgcggttgaagcaatgaactggcttaagtctgctgctaagctgctggctgctgaggtcaaagataagaagactggagagattcttcgcaagcgttgcgctgtgcattgggtaactcctgatggtttccctgtgtggcaggaatacaagaagcctattcagacgcgcttgaacctgatgttcctcggtcagttccgcttacagcctaccattaacaccaacaaagatagcgagattgatgcacataaacaggagtctggtatcgctcctaactttgtacacagccaagacggtagccaccttcgtaagactgtagtgtgggcacacgagaagtacggaatcgaatcttttgcactgattcacgactccttcggtaccattccggctgacgctgcgaacctgttcaaagcagtgcgcgaaactatggttgacacatatgagtcttgtgatgtactggctgatttctacgaccagttcgctgaccagttgcacgagtctcaattggacaaaatgccagcacttccggctaaaggtaacttgaacctccgtgacatcttagagtcggacttcgcgttcgcg

SEQ ID NO: 666 - protein, 890 aa, synthetic construct
  REGION 1..890: note = Variant of RNA polymerase
MHHHHHHMNTINIAKNDFSDIELAAIPFNTLADHYGEGLAREQLALEHESYEMGEARFRKMFERQLKAGEVADNAAAKPLITTLLPKMIARINDWFEEVKAKRGKRPTAFQFLQEIKPEAVAYITIKTTLACLTSADRTTVQAVASAIGRAIEDEARFGRIRDLEAKHFLKNVEEQLNKRVGHVYKKAFMQVVEADMLSKGLLGGEAWSSWHKEDSIHVGVRCIEMLIESTGMVSLHRQNAGVVGKDSETIELAPEYAEAIATRAGALAGISPMFQPCVVPPKPWTGITGGGYWANGRRPLALVRTHSKKGLMRYEDVYMPEVYKAINIAQNTAWSINKWVLAVANVITKWKHCPVEDIPAIEREELPMKPEDIDMNPEALTAWKRAKAAVYRKDKARKSRRILLEFMLEQANKFANHKAIWFPYNMDWRGRVYAVSMFNPQGNDMTKGLLTLAKGKPIGKEGYYWLKIHGANCAGVDKVPFPERIKFIEENHENIMACAKSPLENTWWAEQDSPFCFLAFCFEYAGVQHHGLSYNCSLPLAFDGSCSGIQHFSAMLRDEVGGRAVNLLPSETVQDIYGIVAKKVNEILQADAINGTDNEVVTVTDENEGEISEKVKLGTKALAGQWLAYGVTRSVTKRSVMTLAYGSKEFGFRQQVLRHTIQPAMDSGKGLMFTQPNQAAGYMAKLIWESVSVTVVAAVEAMNWLKSAAKLLAAEVKDKKTGEILRKRCAVHWVTPDGFPVWQEYKKPIQTRLNLMFLGQFRLQPTINTNKDSEIDAHKQESGIAPNFVHSQDGSHLRKTVVWAHEKYGIESFALIHDSFGTIPADAANLFKAVRETMVDTYESCDVLADFYDQFADQLHESQLDKMPALPAKGNLNLRDILESDFAFA

SEQ ID NO: 667 - DNA, 2670 bp, synthetic construct
  misc_feature 1..2670: note = Variant of RNA polymerase
  source 1..2670: mol_type = other DNA
atgcaccatcaccatcaccatatgaacacgattaacatcgctaagaacgacttctctgacatcgaactggctgctatcccgttcaacactctggctgaccattacggtgagggtttagctcgcgaacagttggcccttgagcatgagtcttacgagatgggtgaagcacgtttccgcaagatgtttgagcgtcaacttaaagctggtgaggttgcggataacgctgccgccaagcctctcatcactaccctactccctaagatgattgcacgcatcaacgactggtttgaggaagtgaaagctaagcgcggcaagcgcccgacagccttccagttcctgcaagaaatcaagccggaagccgtagcgtacatcaccattaagaccactctggcttgcctaaccagtgcggaccgtacaaccgttcaggctgtagcaagcgcaatcggttatgccattgaggacgaggctcgcttcggtcgtatccgtgaccttgaagctaagcacttcctgaaaaacgttgaggaacaactcaacaagcgcgtagggcacgtctacaagaaagcatttatgcaagttgtcgaggctgacatgctctctaagggtctactcggtggcgaggcgtggtcttcgtggcataaggaagactctattcatgtaggagtacgctgcatcgagatgctcattgagtcaaccggaatggttagcttacaccgccaaaatgctggcgtagtaggtaaagactctgagactatcgaactcgcacctgaatacgctgaggctatcgcaacccgtgcaggtgcgctggctggcatctctccgatgttccaaccttgcgtagttcctcctaagccgtggactggcattactggtggtggctattgggctaacggtcgtcgtcctctggcgctggtgcgtactcacagtaagaaaggtctgatgcgctacgaagacgtttacatgcctgaggtgtacaaagcgattaacattgcgcaaaacaccgcctggtcgatcaacaagtgggtcctggcggtcgccaacgtaatcaccaagtggaagcattgtccggtcgaggacatccctgcgattgagcgtgaagaactcccgatgaaaccggaagacatcgacatgaatcctgaggctctcaccgcgtggaaacgtgctaaagctgctgtgtaccgcaaggacaaggctcgcaagtctcgccgtatcttgcttgagttcatgcttgagcaagccaataagtttgctaaccataaggccatctggttcccttacaacatggactggcgcggtcgtgtttacgctgtgtcaatgttcaacccgcaaggtaacgatatgaccaaaggactgcttacgctggcgaaaggtaaaccaatcggtaaggaaggttactactggctgaaaatccacggtgcaaactgtgcgggtgtcgataaggttccgttccctgagcgcatcaagttcattgaggaaaaccacgagaacatcatggcttgcgctaagtctccactggagaacacttggtgggctgagcaagatagtccgttctgcttccttgcgttctgctttgagtacgctggggtacagcaccacggcctgagctataactgctcccttccgctggcgtttgacgggtcttgctctggcatccagcacttctccgcgatgctccgagatgaggtaggtggtcgcgcggttaacttgcttcctagtgaaaccgttcaggacatctacgggattgttgctaagaaagtcaacgagattctacaagcagacgcaatcaatgggaccgataacgaagtagttaccgtgaccgatgagaacgaaggtgaaatctctgagaaagtcaagctgggcactaaggcactggctggtcaatggctggcttacggtgttactcgcagtgtgactaagcgttcagtcatgacgctggcttacgggtccaaagagttcggcttccgtcaacaagtgctgcgccacactattcagccagctattgattccggcaagggtctgatgttcactcagccgaatcaggctgctggatacatggctaagctgatttgggaatctgtgagcgtgacggtggtagctgcggttgaagcaatgaactggcttaagtctgctgctaagctgctggctgctgaggtcaaagataagaagactggagagattcttcgcaagcgttgcgctgtgcattgggtaactcctgatggtttccctgtgtggcaggaatacaagaagcctattcagacgcgcttgaacctgatgttcctcggtcagttccgcttacagcctaccattaacaccaacaaagatagcgagattgatgcacataaacaggagtctggtatcgctcctaactttgtacacagccaagacggtagccaccttcgtaagactgtagtgtgggcacacgagaagtacggaatcgaatcttttgcactgattcacgactccttcggtaccattccggctgacgctgcgaacctgttcaaagcagtgcgcgaaactatggttgacacatatgagtcttgtgatgtactggctgatttctacgaccagttcgctgaccagttgcacgagtctcaattggacaaaatgccagcacttccggctaaaggtaacttgaacctccgtgacatcttagagtcggacttcgcgttcgcg

SEQ ID NO: 668 - protein, 890 aa, synthetic construct
  REGION 1..890: note = Variant of RNA polymerase
MHHHHHHMNTINIAKNDFSDIELAAIPFNTLADHYGEGLAREQLALEHESYEMGEARFRKMFERQLKAGEVADNAAAKPLITTLLPKMIARINDWFEEVKAKRGKRPTAFQFLQEIKPEAVAYITIKTTLACLTSADRTTVQAVASAIGYAIEDEARFGRIRDLEAKHFLKNVEEQLNKRVGHVYKKAFMQVVEADMLSKGLLGGEAWSSWHKEDSIHVGVRCIEMLIESTGMVSLHRQNAGVVGKDSETIELAPEYAEAIATRAGALAGISPMFQPCVVPPKPWTGITGGGYWANGRRPLALVRTHSKKGLMRYEDVYMPEVYKAINIAQNTAWSINKWVLAVANVITKWKHCPVEDIPAIEREELPMKPEDIDMNPEALTAWKRAKAAVYRKDKARKSRRILLEFMLEQANKFANHKAIWFPYNMDWRGRVYAVSMFNPQGNDMTKGLLTLAKGKPIGKEGYYWLKIHGANCAGVDKVPFPERIKFIEENHENIMACAKSPLENTWWAEQDSPFCFLAFCFEYAGVQHHGLSYNCSLPLAFDGSCSGIQHFSAMLRDEVGGRAVNLLPSETVQDIYGIVAKKVNEILQADAINGTDNEVVTVTDENEGEISEKVKLGTKALAGQWLAYGVTRSVTKRSVMTLAYGSKEFGFRQQVLRHTIQPAIDSGKGLMFTQPNQAAGYMAKLIWESVSVTVVAAVEAMNWLKSAAKLLAAEVKDKKTGEILRKRCAVHWVTPDGFPVWQEYKKPIQTRLNLMFLGQFRLQPTINTNKDSEIDAHKQESGIAPNFVHSQDGSHLRKTVVWAHEKYGIESFALIHDSFGTIPADAANLFKAVRETMVDTYESCDVLADFYDQFADQLHESQLDKMPALPAKGNLNLRDILESDFAFA

SEQ ID NO: 669 - DNA, 2670 bp, synthetic construct
  misc_feature 1..2670: note = Variant of RNA polymerase
  source 1..2670: mol_type = other DNA
atgcaccatcaccatcaccatatgaacacgattaacatcgctaagaacgacttctctgacatcgaactggctgctatcccgttcaacactctggctgaccattacggtgagggtttagctcgcgaacagttgaagcttgagcatgagtcttacgagatgggtgaagcacgtttccgcaagatgtttgagcgtcaacttaaagctggtgaggttgcggataacgctgccgccaagcctctcatcactaccctactccctaagatgattgcacgcatcaacgactggtttgaggaagtgaaagctaagcgcggcaagcgcccgacagccttccagttcctgcaagaaatcaagccggaagccgtagcgtacatcaccattaagaccactctggcttgcctaaccagtgcggaccgtacaaccgttcaggctgtagcaagcgcaatcggtcgggccattgaggacgaggctcgcttcggtcgtatccgtgaccttgaagctaagcacttcctgaaaaacgttgaggaacaactcaacaagcgcgtagggcacgtctacaagaaagcatttatgcaagttgtcgaggctgacatgctctctaagggtctactcggtggcgaggcgtggtcttcgtggcataaggaagactctattcatgtaggagtacgctgcatcgagatgctcattgagtcaaccggaatggttagcttacaccgccaaaatgctggcgtagtaggtaaagactctgagactatcgaactcgcacctgaatacgctgaggctatcgcaacccgtgcaggtgcgctggctggcatctctccgatgttccaaccttgcgtagttcctcctaagccgtggactggcattactggtggtggctattgggctaacggtcgtcgtcctctggcgctggtgcgtactcacagtaagaaaggtctgatgcgctacgaagacgtttacatgcctgaggtgtacaaagcgattaacattgcgcaaaacaccgcctggtcgatcaacaagtgggtcctggcggtcgccaacgtaatcaccaagtggaagcattgtccggtcgaggacatccctgcgattgagcgtgaagaactcccgatgaaaccggaagacatcgacatgaatcctgaggctctcaccgcgtggaaacgtgctaaagctgctgtgtaccgcaaggacaaggctcgcaagtctcgccgtatcttgcttgagttcatgcttgagcaagccaataagtttgctaaccataaggccatctggttcccttacaacatggactggcgcggtcgtgtttacgctgtgtcaatgttcaacccgcaaggtaacgatatgaccaaaggactgcttacgctggcgaaaggtaaaccaatcggtaaggaaggttactactggctgaaaatccacggtgcaaactgtgcgggtgtcgataaggttccgttccctgagcgcatcaagttcattgaggaaaaccacgagaacatcatggcttgcgctaagtctccactggagaacacttggtgggctgagcaagatagtccgttctgcttccttgcgttctgctttgagtacgctggggtacagcaccacggcctgagctataactgctcccttccgctggcgtttgacgggtcttgctctggcatccagcacttctccgcgatgctccgagatgaggtaggtggtcgcgcggttaacttgcttcctagtgaaaccgttcaggacatctacgggattgttgctaagaaagtcaacgagattctacaagcagacgcaatcaatgggaccgataacgaagtagttaccgtgaccgatgagaacgaaggtgaaatctctgagaaagtcaagctgggcactaaggcactggctggtcaatggctggcttacggtgttactcgcagtgtgactaagcgttcagtcatgacgctggcttacgggtccaaagagttcggcttccgtcaacaagtgctgcgccacactattcagccagctattgattccggcaagggtctgatgttcactcagccgaatcaggctgctggatacatggctaagctgatttgggaatctgtgagcgtgacggtggtagctgcggttgaagcaatgaactggcttaagtctgctgctaagctgctggctgctgaggtcaaagataagaagactggagagattcttcgcaagcgttgcgctgtgcattgggtaactcctgatggtttccctgtgtggcaggaatacaagaagcctattcagacgcgcttgaacctgatgttcctcggtcagttccgcttacagcctaccattaacaccaacaaagatagcgagattgatgcacataaacaggagtctggtatcgctcctaactttgtacacagccaagacggtagccaccttcgtaagactgtagtgtgggcacacgagaagtacggaatcgaatcttttgcactgattcacgactccttcggtaccattccggctgacgctgcgaacctgttcaaagcagtgcgcgaaactatggttgacacatatgagtcttgtgatgtactggctgatttctacgaccagttcgctgaccagttgcacgagtctcaattggacaaaatgccagcacttccggctaaaggtaacttgaacctccgtgacatcttagagtcggacttcgcgttcgcg

SEQ ID NO: 670 - protein, 890 aa, synthetic construct
  REGION 1..890: note = Variant of RNA polymerase
MHHHHHHMNTINIAKNDFSDIELAAIPFNTLADHYGEGLAREQLKLEHESYEMGEARFRKMFERQLKAGEVADNAAAKPLITTLLPKMIARINDWFEEVKAKRGKRPTAFQFLQEIKPEAVAYITIKTTLACLTSADRTTVQAVASAIGRAIEDEARFGRIRDLEAKHFLKNVEEQLNKRVGHVYKKAFMQVVEADMLSKGLLGGEAWSSWHKEDSIHVGVRCIEMLIESTGMVSLHRQNAGVVGKDSETIELAPEYAEAIATRAGALAGISPMFQPCVVPPKPWTGITGGGYWANGRRPLALVRTHSKKGLMRYEDVYMPEVYKAINIAQNTAWSINKWVLAVANVITKWKHCPVEDIPAIEREELPMKPEDIDMNPEALTAWKRAKAAVYRKDKARKSRRILLEFMLEQANKFANHKAIWFPYNMDWRGRVYAVSMFNPQGNDMTKGLLTLAKGKPIGKEGYYWLKIHGANCAGVDKVPFPERIKFIEENHENIMACAKSPLENTWWAEQDSPFCFLAFCFEYAGVQHHGLSYNCSLPLAFDGSCSGIQHFSAMLRDEVGGRAVNLLPSETVQDIYGIVAKKVNEILQADAINGTDNEVVTVTDENEGEISEKVKLGTKALAGQWLAYGVTRSVTKRSVMTLAYGSKEFGFRQQVLRHTIQPAIDSGKGLMFTQPNQAAGYMAKLIWESVSVTVVAAVEAMNWLKSAAKLLAAEVKDKKTGEILRKRCAVHWVTPDGFPVWQEYKKPIQTRLNLMFLGQFRLQPTINTNKDSEIDAHKQESGIAPNFVHSQDGSHLRKTVVWAHEKYGIESFALIHDSFGTIPADAANLFKAVRETMVDTYESCDVLADFYDQFADQLHESQLDKMPALPAKGNLNLRDILESDFAFA

SEQ ID NO: 671 - DNA, 2670 bp, synthetic construct
  misc_feature 1..2670: note = Variant of RNA polymerase
  source 1..2670: mol_type = other DNA
atgcaccatcaccatcaccatatgaacacgattaacatcgctaagaacgacttctctgacatcgaactggctgctatcccgttcaacactctggctgaccattacggtgagggtttagctcgcgaacagttggcccttgagcatgagtcttacgagatgggttgggcacgtttccgcaagatgtttgagcgtcaacttaaagctggtgaggttgcggataacgctgccgccaagcctctcatcactaccctactccctaagatgattgcacgcatcaacgactggtttgaggaagtgaaagctaagcgcggcaagcgcccgacagccttccagttcctgcaagaaatcaagccggaagccgtagcgtacatcaccattaagaccactctggcttgcctaaccagtgcggaccgtacaaccgttcaggctgtagcaagcgcaatcggtcgggccattgaggacgaggctcgcttcggtcgtatccgtgaccttgaagctaagcacttcctgaaaaacgttgaggaacaactcaacaagcgcgtagggcacgtctacaagaaagcatttatgcaagttgtcgaggctgacatgctctctaagggtctactcggtggcgaggcgtggtcttcgtggcataaggaagactctattcatgtaggagtacgctgcatcgagatgctcattgagtcaaccggaatggttagcttacaccgccaaaatgctggcgtagtaggtaaagactctgagactatcgaactcgcacctgaatacgctgaggctatcgcaacccgtgcaggtgcgctggctggcatctctccgatgttccaaccttgcgtagttcctcctaagccgtggactggcattactggtggtggctattgggctaacggtcgtcgtcctctggcgctggtgcgtactcacagtaagaaaggtctgatgcgctacgaagacgtttacatgcctgaggtgtacaaagcgattaacattgcgcaaaacaccgcctggtcgatcaacaagtgggtcctggcggtcgccaacgtaatcaccaagtggaagcattgtccggtcgaggacatccctgcgattgagcgtgaagaactcccgatgaaaccggaagacatcgacatgaatcctgaggctctcaccgcgtggaaacgtgctaaagctgctgtgtaccgcaaggacaaggctcgcaagtctcgccgtatcttgcttgagttcatgcttgagcaagccaataagtttgctaaccataaggccatctggttcccttacaacatggactggcgcggtcgtgtttacgctgtgtcaatgttcaacccgcaaggtaacgatatgaccaaaggactgcttacgctggcgaaaggtaaaccaatcggtaaggaaggttactactggctgaaaatccacggtgcaaactgtgcgggtgtcgataaggttccgttccctgagcgcatcaagttcattgaggaaaaccacgagaacatcatggcttgcgctaagtctccactggagaacacttggtgggctgagcaagatagtccgttctgcttccttgcgttctgctttgagtacgctggggtacagcaccacggcctgagctataactgctcccttccgctggcgtttgacgggtcttgctctggcatccagcacttctccgcgatgctccgagatgaggtaggtggtcgcgcggttaacttgcttcctagtgaaaccgttcaggacatctacgggattgttgctaagaaagtcaacgagattctacaagcagacgcaatcaatgggaccgataacgaagtagttaccgtgaccgatgagaacgaaggtgaaatctctgagaaagtcaagctgggcactaaggcactggctggtcaatggctggcttacggtgttactcgcagtgtgactaagcgttcagtcatgacgctggcttacgggtccaaagagttcggcttccgtcaacaagtgctgcgccacactattcagccagctattgattccggcaagggtctgatgttcactcagccgaatcaggctgctggatacatggctaagctgatttgggaatctgtgagcgtgacggtggtagctgcggttgaagcaatgaactggcttaagtctgctgctaagctgctggctgctgaggtcaaagataagaagactggagagattcttcgcaagcgttgcgctgtgcattgggtaactcctgatggtttccctgtgtggcaggaatacaagaagcctattcagacgcgcttgaacctgatgttcctcggtcagttccgcttacagcctaccattaacaccaacaaagatagcgagattgatgcacataaacaggagtctggtatcgctcctaactttgtacacagccaagacggtagccaccttcgtaagactgtagtgtgggcacacgagaagtacggaatcgaatcttttgcactgattcacgactccttcggtaccattccggctgacgctgcgaacctgttcaaagcagtgcgcgaaactatggttgacacatatgagtcttgtgatgtactggctgatttctacgaccagttcgctgaccagttgcacgagtctcaattggacaaaatgccagcacttccggctaaaggtaacttgaacctccgtgacatcttagagtcggacttcgcgttcgcg

SEQ ID NO: 672 - protein, 890 aa, synthetic construct
  REGION 1..890: note = Variant of RNA polymerase
MHHHHHHMNTINIAKNDFSDIELAAIPFNTLADHYGEGLAREQLALEHESYEMGWARFRKMFERQLKAGEVADNAAAKPLITTLLPKMIARINDWFEEVKAKRGKRPTAFQFLQEIKPEAVAYITIKTTLACLTSADRTTVQAVASAIGRAIEDEARFGRIRDLEAKHFLKNVEEQLNKRVGHVYKKAFMQVVEADMLSKGLLGGEAWSSWHKEDSIHVGVRCIEMLIESTGMVSLHRQNAGVVGKDSETIELAPEYAEAIATRAGALAGISPMFQPCVVPPKPWTGITGGGYWANGRRPLALVRTHSKKGLMRYEDVYMPEVYKAINIAQNTAWSINKWVLAVANVITKWKHCPVEDIPAIEREELPMKPEDIDMNPEALTAWKRAKAAVYRKDKARKSRRILLEFMLEQANKFANHKAIWFPYNMDWRGRVYAVSMFNPQGNDMTKGLLTLAKGKPIGKEGYYWLKIHGANCAGVDKVPFPERIKFIEENHENIMACAKSPLENTWWAEQDSPFCFLAFCFEYAGVQHHGLSYNCSLPLAFDGSCSGIQHFSAMLRDEVGGRAVNLLPSETVQDIYGIVAKKVNEILQADAINGTDNEVVTVTDENEGEISEKVKLGTKALAGQWLAYGVTRSVTKRSVMTLAYGSKEFGFRQQVLRHTIQPAIDSGKGLMFTQPNQAAGYMAKLIWESVSVTVVAAVEAMNWLKSAAKLLAAEVKDKKTGEILRKRCAVHWVTPDGFPVWQEYKKPIQTRLNLMFLGQFRLQPTINTNKDSEIDAHKQESGIAPNFVHSQDGSHLRKTVVWAHEKYGIESFALIHDSFGTIPADAANLFKAVRETMVDTYESCDVLADFYDQFADQLHESQLDKMPALPAKGNLNLRDILESDFAFA

SEQ ID NO: 673 - DNA, 2670 bp, synthetic construct
  misc_feature 1..2670: note = Variant of RNA polymerase
  source 1..2670: mol_type = other DNA
atgcaccatcaccatcaccatatgaacacgattaacatcgctaagaacgacttctctgacatcgaactggctgctatcccgttcaacactctggctgaccattacggtgagggtttagctcgcgaacagttggcccttgagcatgagtcttacgagatgggtgaagcacgtttccgcaagatgtttgagcgtcaacttaaagctggtgaggttgcggataacgctgccgccaagcctctcatcactaccctactccctaagatgattgcacgcatcaacgactggtttgaggaagtgaaagctaagcgcggcaagcgcccgacagccttccagttcctgcaagaaatcaagccggaagccgtagcgtacatcaccattaagaccactctggcttgcctaaccggggcggaccgtacaaccgttcaggctgtagcaagcgcaatcggtcgggccattgaggacgaggctcgcttcggtcgtatccgtgaccttgaagctaagcacttcctgaaaaacgttgaggaacaactcaacaagcgcgtagggcacgtctacaagaaagcatttatgcaagttgtcgaggctgacatgctctctaagggtctactcggtggcgaggcgtggtcttcgtggcataaggaagactctattcatgtaggagtacgctgcatcgagatgctcattgagtcaaccggaatggttagcttacaccgccaaaatgctggcgtagtaggtaaagactctgagactatcgaactcgcacctgaatacgctgaggctatcgcaacccgtgcaggtgcgctggctggcatctctccgatgttccaaccttgcgtagttcctcctaagccgtggactggcattactggtggtggctattgggctaacggtcgtcgtcctctggcgctggtgcgtactcacagtaagaaaggtctgatgcgctacgaagacgtttacatgcctgaggtgtacaaagcgattaacattgcgcaaaacaccgcctggtcgatcaacaagtgggtcctggcggtcgccaacgtaatcaccaagtggaagcattgtccggtcgaggacatccctgcgattgagcgtgaagaactcccgatgaaaccggaagacatcgacatgaatcctgaggctctcaccgcgtggaaacgtgctaaagctgctgtgtaccgcaaggacaaggctcgcaagtctcgccgtatcttgcttgagttcatgcttgagcaagccaataagtttgctaaccataaggccatctggttcccttacaacatggactggcgcggtcgtgtttacgctgtgtcaatgttcaacccgcaaggtaacgatatgaccaaaggactgcttacgctggcgaaaggtaaaccaatcggtaaggaaggttactactggctgaaaatccacggtgcaaactgtgcgggtgtcgataaggttccgttccctgagcgcatcaagttcattgaggaaaaccacgagaacatcatggcttgcgctaagtctccactggagaacacttggtgggctgagcaagatagtccgttctgcttccttgcgttctgctttgagtacgctggggtacagcaccacggcctgagctataactgctcccttccgctggcgtttgacgggtcttgctctggcatccagcacttctccgcgatgctccgagatgaggtaggtggtcgcgcggttaacttgcttcctagtgaaaccgttcaggacatctacgggattgttgctaagaaagtcaacgagattctacaagcagacgcaatcaatgggaccgataacgaagtagttaccgtgaccgatgagaacgaaggtgaaatctctgagaaagtcaagctgggcactaaggcactggctggtcaatggctggcttacggtgttactcgcagtgtgactaagcgttcagtcatgacgctggcttacgggtccaaagagttcggcttccgtcaacaagtgctgcgccacactattcagccagctattgattccggcaagggtctgatgttcactcagccgaatcaggctgctggatacatggctaagctgatttgggaatctgtgagcgtgacggtggtagctgcggttgaagcaatgaactggcttaagtctgctgctaagctgctggctgctgaggtcaaagataagaagactggagagattcttcgcaagcgttgcgctgtgcattgggtaactcctgatggtttccctgtgtggcaggaatacaagaagcctattcagacgcgcttgaacctgatgttcctcggtcagttccgcttacagcctaccattaacaccaacaaagatagcgagattgatgcacataaacaggagtctggtatcgctcctaactttgtacacagccaagacggtagccaccttcgtaagactgtagtgtgggcacacgagaagtacggaatcgaatcttttgcactgattcacgactccttcggtaccattccggctgacgctgcgaacctgttcaaagcagtgcgcgaaactatggttgacacatatgagtcttgtgatgtactggctgatttctacgaccagttcgctgaccagttgcacgagtctcaattggacaaaatgccagcacttccggctaaaggtaacttgaacctccgtgacatcttagagtcggacttcgcgttcgcg

SEQ ID NO: 674 - protein, 890 aa, synthetic construct
  REGION 1..890: note = Variant of RNA polymerase
MHHHHHHMNTINIAKNDFSDIELAAIPFNTLADHYGEGLAREQLALEHESYEMGEARFRKMFERQLKAGEVADNAAAKPLITTLLPKMIARINDWFEEVKAKRGKRPTAFQFLQEIKPEAVAYITIKTTLACLTGADRTTVQAVASAIGRAIEDEARFGRIRDLEAKHFLKNVEEQLNKRVGHVYKKAFMQVVEADMLSKGLLGGEAWSSWHKEDSIHVGVRCIEMLIESTGMVSLHRQNAGVVGKDSETIELAPEYAEAIATRAGALAGISPMFQPCVVPPKPWTGITGGGYWANGRRPLALVRTHSKKGLMRYEDVYMPEVYKAINIAQNTAWSINKWVLAVANVITKWKHCPVEDIPAIEREELPMKPEDIDMNPEALTAWKRAKAAVYRKDKARKSRRILLEFMLEQANKFANHKAIWFPYNMDWRGRVYAVSMFNPQGNDMTKGLLTLAKGKPIGKEGYYWLKIHGANCAGVDKVPFPERIKFIEENHENIMACAKSPLENTWWAEQDSPFCFLAFCFEYAGVQHHGLSYNCSLPLAFDGSCSGIQHFSAMLRDEVGGRAVNLLPSETVQDIYGIVAKKVNEILQADAINGTDNEVVTVTDENEGEISEKVKLGTKALAGQWLAYGVTRSVTKRSVMTLAYGSKEFGFRQQVLRHTIQPAIDSGKGLMFTQPNQAAGYMAKLIWESVSVTVVAAVEAMNWLKSAAKLLAAEVKDKKTGEILRKRCAVHWVTPDGFPVWQEYKKPIQTRLNLMFLGQFRLQPTINTNKDSEIDAHKQESGIAPNFVHSQDGSHLRKTVVWAHEKYGIESFALIHDSFGTIPADAANLFKAVRETMVDTYESCDVLADFYDQFADQLHESQLDKMPALPAKGNLNLRDILESDFAFA

SEQ ID NO: 675 - DNA, 2670 bp, synthetic construct
  misc_feature 1..2670: note = Variant of RNA polymerase
  source 1..2670: mol_type = other DNA
atgcaccatcaccatcaccatatgaacacgattaacaatgctaagaacgacttctctgacatcgaactggctgctatcccgttcaacactctggctgaccattacggtgagggtttagctcgcgaacagttggcccttgagcatgagtcttacgagatgggtgaagcacgtttccgcaagatgtttgagcgtcaacttaaagctggtgaggttgcggataacgctgccgccaagcctctcatcactaccctactccctaagatgattgcacgcatcaacgactggtttgaggaagtgaaagctaagcgcggcaagcgcccgacagccttccagttcctgcaagaaatcaagccggaagccgtagcgtacatcaccattaagaccactctggcttgcctaaccagtgcggaccgtacaaccgttcaggctgtagcaagcgcaatcggtcgggccattgaggacgaggctcgcttcggtcgtatccgtgaccttgaagctaagcacttcctgaaaaacgttgaggaacaactcaacaagcgcgtagggcacgtctacaagaaagcatttatgcaagttgtcgaggctgacatgctctctaagggtctactcggtggcgaggcgtggtcttcgtggcataaggaagactctattcatgtaggagtacgctgcatcgagatgctcattgagtcaaccggaatggttagcttacaccgccaaaatgctggcgtagtaggtaaagactctgagactatcgaactcgcacctgaatacgctgaggctatcgcaacccgtgcaggtgcgctggctggcatctctccgatgttccaaccttgcgtagttcctcctaagccgtggactggcattactggtggtggctattgggctaacggtcgtcgtcctctggcgctggtgcgtactcacagtaagaaaggtctgatgcgctacgaagacgtttacatgcctgaggtgtacaaagcgattaacattgcgcaaaacaccgcctggtcgatcaacaagtgggtcctggcggtcgccaacgtaatcaccaagtggaagcattgtccggtcgaggacatccctgcgattgagcgtgaagaactcccgatgaaaccggaagacatcgacatgaatcctgaggctctcaccgcgtggaaacgtgctaaagctgctgtgtaccgcaaggacaaggctcgcaagtctcgccgtatcttgcttgagttcatgcttgagcaagccaataagtttgctaaccataaggccatctggttcccttacaacatggactggcgcggtcgtgtttacgctgtgtcaatgttcaacccgcaaggtaacgatatgaccaaaggactgcttacgctggcgaaaggtaaaccaatcggtaaggaaggttactactggctgaaaatccacggtgcaaactgtgcgggtgtcgataaggttccgttccctgagcgcatcaagttcattgaggaaaaccacgagaacatcatggcttgcgctaagtctccactggagaacacttggtgggctgagcaagatagtccgttctgcttccttgcgttctgctttgagtacgctggggtacagcaccacggcctgagctataactgctcccttccgctggcgtttgacgggtcttgctctggcatccagcacttctccgcgatgctccgagatgaggtaggtggtcgcgcggttaacttgcttcctagtgaaaccgttcaggacatctacgggattgttgctaagaaagtcaacgagattctacaagcagacgcaatcaatgggaccgataacgaagtagttaccgtgaccgatgagaacgaaggtgaaatctctgagaaagtcaagctgggcactaaggcactggctggtcaatggctggcttacggtgttactcgcagtgtgactaagcgttcagtcatgacgctggcttacgggtccaaagagttcggcttccgtcaacaagtgctgcgccacactattcagccagctattgattccggcaagggtctgatgttcactcagccgaatcaggctgctggatacatggctaagctgatttgggaatctgtgagcgtgacggtggtagctgcggttgaagcaatgaactggcttaagtctgctgctaagctgctggctgctgaggtcaaagataagaagactggagagattcttcgcaagcgttgcgctgtgcattgggtaactcctgatggtttccctgtgtggcaggaatacaagaagcctattcagacgcgcttgaacctgatgttcctcggtcagttccgcttacagcctaccattaacaccaacaaagatagcgagattgatgcacataaacaggagtctggtatcgctcctaactttgtacacagccaagacggtagccaccttcgtaagactgtagtgtgggcacacgagaagtacggaatcgaatcttttgcactgattcacgactccttcggtaccattccggctgacgctgcgaacctgttcaaagcagtgcgcgaaactatggttgacacatatgagtcttgtgatgtactggctgatttctacgaccagttcgctgaccagttgcacgagtctcaattggacaaaatgccagcacttccggctaaaggtaacttgaacctccgtgacatcttagagtcggacttcgcgttcgcg

SEQ ID NO: 676 - protein, 890 aa, synthetic construct
  REGION 1..890: note = Variant of RNA polymerase
MHHHHHHMNTINNAKNDFSDIELAAIPFNTLADHYGEGLAREQLALEHESYEMGEARFRKMFERQLKAGEVADNAAAKPLITTLLPKMIARINDWFEEVKAKRGKRPTAFQFLQEIKPEAVAYITIKTTLACLTSADRTTVQAVASAIGRAIEDEARFGRIRDLEAKHFLKNVEEQLNKRVGHVYKKAFMQVVEADMLSKGLLGGEAWSSWHKEDSIHVGVRCIEMLIESTGMVSLHRQNAGVVGKDSETIELAPEYAEAIATRAGALAGISPMFQPCVVPPKPWTGITGGGYWANGRRPLALVRTHSKKGLMRYEDVYMPEVYKAINIAQNTAWSINKWVLAVANVITKWKHCPVEDIPAIEREELPMKPEDIDMNPEALTAWKRAKAAVYRKDKARKSRRILLEFMLEQANKFANHKAIWFPYNMDWRGRVYAVSMFNPQGNDMTKGLLTLAKGKPIGKEGYYWLKIHGANCAGVDKVPFPERIKFIEENHENIMACAKSPLENTWWAEQDSPFCFLAFCFEYAGVQHHGLSYNCSLPLAFDGSCSGIQHFSAMLRDEVGGRAVNLLPSETVQDIYGIVAKKVNEILQADAINGTDNEVVTVTDENEGEISEKVKLGTKALAGQWLAYGVTRSVTKRSVMTLAYGSKEFGFRQQVLRHTIQPAIDSGKGLMFTQPNQAAGYMAKLIWESVSVTVVAAVEAMNWLKSAAKLLAAEVKDKKTGEILRKRCAVHWVTPDGFPVWQEYKKPIQTRLNLMFLGQFRLQPTINTNKDSEIDAHKQESGIAPNFVHSQDGSHLRKTVVWAHEKYGIESFALIHDSFGTIPADAANLFKAVRETMVDTYESCDVLADFYDQFADQLHESQLDKMPALPAKGNLNLRDILESDFAFA

SEQ ID NO: 677 - DNA, 2670 bp, synthetic construct
  misc_feature 1..2670: note = Variant of RNA polymerase
  source 1..2670: mol_type = other DNA
atgcaccatcaccatcaccatatgaacacgattaacatcgctaagaacgacttctctgacatcgaactggctgctatcccgttcaacactctggctgagcattacggtgagggtttagctcgcgaacagttggcccttgagcatgagtcttacgagatgggtgaagcacgtttccgcaagatgtttgagcgtcaacttaaagctggtgaggttgcggataacgctgccgccaagcctctcatcactaccctactccctaagatgattgcacgcatcaacgactggtttgaggaagtgaaagctaagcgcggcaagcgcccgacagccttccagttcctgcaagaaatcaagccggaagccgtagcgtacatcaccattaagaccactctggcttgcctaaccagtgcggaccgtacaaccgttcaggctgtagcaagcgcaatcggtagggccattgaggacgaggctcgcttcggtcgtatccgtgaccttgaagctaagcacttcctgaaaaacgttgaggaacaactcaacaagcgcgtagggcacgtctacaagaaagcatttatgcaagttgtcgaggctgacatgctctctaagggtctactcggtggcgaggcgtggtcttcgtggcataaggaagactctattcatgtaggagtacgctgcatcgagatgctcattgagtcaaccggaatggttagcttacaccgccaaaatgctggcgtagtaggtaaagactctgagactatcgaactcgcacctgaatacgctgaggctatcgcaacccgtgcaggtgcgctggctggcatctctccgatgttccaaccttgcgtagttcctcctaagccgtggactggcattactggtggtggctattgggctaacggtcgtcgtcctctggcgctggtgcgtactcacagtaagaaaggtctgatgcgctacgaagacgtttacatgcctgaggtgtacaaagcgattaacattgcgcaaaacaccgcctggtcgatcaacaagtgggtcctggcggtcgccaacgtaatcaccaagtggaagcattgtccggtcgaggacatccctgcgattgagcgtgaagaactcccgatgaaaccggaagacatcgacatgaatcctgaggctctcaccgcgtggaaacgtgctaaagctgctgtgtaccgcaaggacaaggctcgcaagtctcgccgtatcttgcttgagttcatgcttgagcaagccaataagtttgctaaccataaggccatctggttcccttacaacatggactggcgcggtcgtgtttacgctgtgtcaatgttcaacccgcaaggtaacgatatgaccaaaggactgcttacgctggcgaaaggtaaaccaatcggtaaggaaggttactactggctgaaaatccacggtgcaaactgtgcgggtgtcgataaggttccgttccctgagcgcatcaagttcattgaggaaaaccacgagaacatcatggcttgcgctaagtctccactggagaacacttggtgggctgagcaagatagtccgttctgcttccttgcgttctgctttgagtacgctggggtacagcaccacggcctgagctataactgctcccttccgctggcgtttgacgggtcttgctctggcatccagcacttctccgcgatgctccgagatgaggtaggtggtcgcgcggttaacttgcttcctagtgaaaccgttcaggacatctacgggattgttgctaagaaagtcaacgagattctacaagcagacgcaatcaatgggaccgataacgaagtagttaccgtgaccgatgagaacgaaggtgaaatctctgagaaagtcaagctgggcactaaggcactggctggtcaatggctggcttacggtgttactcgcagtgtgactaagcgttcagtcatgacgctggcttacgggtccaaagagttcggcttccgtcaacaagtgctgcgccacactattcagccagctattgattccggcaagggtctgatgttcactcagccgaatcaggctgctggatacatggctaagctgatttgggaatctgtgagcgtgacggtggtagctgcggttgaagcaatgaactggcttaagtctgctgctaagctgctggctgctgaggtcaaagataagaagactggagagattcttcgcaagcgttgcgctgtgcattgggtaactcctgatggtttccctgtgtggcaggaatacaagaagcctattcagacgcgcttgaacctgatgttcctcggtcagttccgcttacagcctaccattaacaccaacaaagatagcgagattgatgcacataaacaggagtctggtatcgctcctaactttgtacacagccaagacggtagccaccttcgtaagactgtagtgtgggcacacgagaagtacggaatcgaatcttttgcactgattcacgactccttcggtaccattccggctgacgctgcgaacctgttcaaagcagtgcgcgaaactatggttgacacatatgagtcttgtgatgtactggctgatttctacgaccagttcgctgaccagttgcacgagtctcaattggacaaaatgccagcacttccggctaaaggtaacttgaacctccgtgacatcttagagtcggacttcgcgttcgcg

SEQ ID NO: 678 - protein, 890 aa, synthetic construct
  REGION 1..890: note = Variant of RNA polymerase
MHHHHHHMNTINIAKNDFSDIELAAIPFNTLAEHYGEGLAREQLALEHESYEMGEARFRKMFERQLKAGEVADNAAAKPLITTLLPKMIARINDWFEEVKAKRGKRPTAFQFLQEIKPEAVAYITIKTTLACLTSADRTTVQAVASAIGRAIEDEARFGRIRDLEAKHFLKNVEEQLNKRVGHVYKKAFMQVVEADMLSKGLLGGEAWSSWHKEDSIHVGVRCIEMLIESTGMVSLHRQNAGVVGKDSETIELAPEYAEAIATRAGALAGISPMFQPCVVPPKPWTGITGGGYWANGRRPLALVRTHSKKGLMRYEDVYMPEVYKAINIAQNTAWSINKWVLAVANVITKWKHCPVEDIPAIEREELPMKPEDIDMNPEALTAWKRAKAAVYRKDKARKSRRILLEFMLEQANKFANHKAIWFPYNMDWRGRVYAVSMFNPQGNDMTKGLLTLAKGKPIGKEGYYWLKIHGANCAGVDKVPFPERIKFIEENHENIMACAKSPLENTWWAEQDSPFCFLAFCFEYAGVQHHGLSYNCSLPLAFDGSCSGIQHFSAMLRDEVGGRAVNLLPSETVQDIYGIVAKKVNEILQADAINGTDNEVVTVTDENEGEISEKVKLGTKALAGQWLAYGVTRSVTKRSVMTLAYGSKEFGFRQQVLRHTIQPAIDSGKGLMFTQPNQAAGYMAKLIWESVSVTVVAAVEAMNWLKSAAKLLAAEVKDKKTGEILRKRCAVHWVTPDGFPVWQEYKKPIQTRLNLMFLGQFRLQPTINTNKDSEIDAHKQESGIAPNFVHSQDGSHLRKTVVWAHEKYGIESFALIHDSFGTIPADAANLFKAVRETMVDTYESCDVLADFYDQFADQLHESQLDKMPALPAKGNLNLRDILESDFAFA

SEQ ID NO: 679 - DNA, 2670 bp, synthetic construct
  misc_feature 1..2670: note = Variant of RNA polymerase
  source 1..2670: mol_type = other DNA
atgcaccatcaccatcaccatatgaacacgattaacatcgctaagaacgacttctctgacatcgaactggctgctatcccgttcaacactctggctgaccattacggtgagggtttagctcgcgaacagttggcccttgagcatgagtcttacgagatgggtgaagcacgtttccgcaagatgtttgagcgtcaacttaaagctggtgaggttgcggataacgctgccgccaagcctctcatcactaccctactccctaagatgattgcacgcatcaacgactggtttgaggaagtgaaagctaagcgcggcaagcgcccgacagccttccagttcctgcaagaaatcaagccggaagccgtagcgtacatcaccattaagaccactctggcttgcctaaccagtgcggaccgtacaaccgttcaggctgtagcaagcgcaatcggtcgggccattgaggacgaggctcgcttcggtcgtatccgtgaccttgaagctaagcacttcctgaaaaacgttgaggaacaactcaacaagcgcgtagggcacgtctacaagaaagcatttatgcaagttgtcgaggctgacatgctctctaagggtctactcggtggcgaggcgtggtcttcgtggcataaggaagactctattcatgtaggagtacgctgcatcgagatgctcattgagtcaaccggaatggttagcttacaccgccaaaatgctggcgtagtatgtaaagactctgagactatcgaactcgcacctgaatacgctgaggctatcgcaacccgtgcaggtgcgctggctggcatctctccgatgttccaaccttgcgtagttcctcctaagccgtggactggcattactggtggtggctattgggctaacggtcgtcgtcctctggcgctggtgcgtactcacagtaagaaaggtctgatgcgctacgaagacgtttacatgcctgaggtgtacaaagcgattaacattgcgcaaaacaccgcctggtcgatcaacaagtgggtcctggcggtcgccaacgtaatcaccaagtggaagcattgtccggtcgaggacatccctgcgattgagcgtgaagaactcccgatgaaaccggaagacatcgacatgaatcctgaggctctcaccgcgtggaaacgtgctaaagctgctgtgtaccgcaaggacaaggctcgcaagtctcgccgtatcttgcttgagttcatgcttgagcaagccaataagtttgctaaccataaggccatctggttcccttacaacatggactggcgcggtcgtgtttacgctgtgtcaatgttcaacccgcaaggtaacgatatgaccaaaggactgcttacgctggcgaaaggtaaaccaatcggtaaggaaggttactactggctgaaaatccacggtgcaaactgtgcgggtgtcgataaggttccgttccctgagcgcatcaagttcattgaggaaaaccacgagaacatcatggcttgcgctaagtctccactggagaacacttggtgggctgagcaagatagtccgttctgcttccttgcgttctgctttgagtacgctggggtacagcaccacggcctgagctataactgctcccttccgctggcgtttgacgggtcttgctctggcatccagcacttctccgcgatgctccgagatgaggtaggtggtcgcgcggttaacttgcttcctagtgaaaccgttcaggacatctacgggattgttgctaagaaagtcaacgagattctacaagcagacgcaatcaatgggaccgataacgaagtagttaccgtgaccgatgagaacgaaggtgaaatctctgagaaagtcaagctgggcactaaggcactggctggtcaatggctggcttacggtgttactcgcagtgtgactaagcgttcagtcatgacgctggcttacgggtccaaagagttcggcttccgtcaacaagtgctgcgccacactattcagccagctattgattccggcaagggtctgatgttcactcagccgaatcaggctgctggatacatggctaagctgatttgggaatctgtgagcgtgacggtggtagctgcggttgaagcaatgaactggcttaagtctgctgctaagctgctggctgctgaggtcaaagataagaagactggagagattcttcgcaagcgttgcgctgtgcattgggtaactcctgatggtttccctgtgtggcaggaatacaagaagcctattcagacgcgcttgaacctgatgttcctcggtcagttccgcttacagcctaccattaacaccaacaaagatagcgagattgatgcacataaacaggagtctggtatcgctcctaactttgtacacagccaagacggtagccaccttcgtaagactgtagtgtgggcacacgagaagtacggaatcgaatcttttgcactgattcacgactccttcggtaccattccggctgacgctgcgaacctgttcaaagcagtgcgcgaaactatggttgacacatatgagtcttgtgatgtactggctgatttctacgaccagttcgctgaccagttgcacgagtctcaattggacaaaatgccagcacttccggctaaaggtaacttgaacctccgtgacatcttagagtcggacttcgcgttcgcg

SEQ ID NO: 680 - protein, 890 aa, synthetic construct
  REGION 1..890: note = Variant of RNA polymerase
MHHHHHHMNTINIAKNDFSDIELAAIPFNTLADHYGEGLAREQLALEHESYEMGEARFRKMFERQLKAGEVADNAAAKPLITTLLPKMIARINDWFEEVKAKRGKRPTAFQFLQEIKPEAVAYITIKTTLACLTSADRTTVQAVASAIGRAIEDEARFGRIRDLEAKHFLKNVEEQLNKRVGHVYKKAFMQVVEADMLSKGLLGGEAWSSWHKEDSIHVGVRCIEMLIESTGMVSLHRQNAGVVCKDSETIELAPEYAEAIATRAGALAGISPMFQPCVVPPKPWTGITGGGYWANGRRPLALVRTHSKKGLMRYEDVYMPEVYKAINIAQNTAWSINKWVLAVANVITKWKHCPVEDIPAIEREELPMKPEDIDMNPEALTAWKRAKAAVYRKDKARKSRRILLEFMLEQANKFANHKAIWFPYNMDWRGRVYAVSMFNPQGNDMTKGLLTLAKGKPIGKEGYYWLKIHGANCAGVDKVPFPERIKFIEENHENIMACAKSPLENTWWAEQDSPFCFLAFCFEYAGVQHHGLSYNCSLPLAFDGSCSGIQHFSAMLRDEVGGRAVNLLPSETVQDIYGIVAKKVNEILQADAINGTDNEVVTVTDENEGEISEKVKLGTKALAGQWLAYGVTRSVTKRSVMTLAYGSKEFGFRQQVLRHTIQPAIDSGKGLMFTQPNQAAGYMAKLIWESVSVTVVAAVEAMNWLKSAAKLLAAEVKDKKTGEILRKRCAVHWVTPDGFPVWQEYKKPIQTRLNLMFLGQFRLQPTINTNKDSEIDAHKQESGIAPNFVHSQDGSHLRKTVVWAHEKYGIESFALIHDSFGTIPADAANLFKAVRETMVDTYESCDVLADFYDQFADQLHESQLDKMPALPAKGNLNLRDILESDFAFA

SEQ ID NO: 681 - DNA, 2670 bp, synthetic construct
  misc_feature 1..2670: note = Variant of RNA polymerase
  source 1..2670: mol_type = other DNA
atgcaccatcaccatcaccatatgaacacgattaacatcgctaagaacgacttctctgacatcgaactggctgctatcccgttcaacactctggtcgaccattacggtgagggtttagctcgcgaacagttggcccttgagcatgagtcttacgagatgggtgaagcacgtttccgcaagatgtttgagcgtcaacttaaagctggtgaggttgcggataacgctgccgccaagcctctcatcactaccctactccctaagatgattgcacgcatcaacgactggtttgaggaagtgaaagctaagcgcggcaagcgcccgacagccttccagttcctgcaagaaatcaagccggaagccgtagcgtacatcaccattaagaccactctggcttgcctaaccagtgcggaccgtacaaccgttcaggctgtagcaagcgcaatcggtcgtgccattgaggacgaggctcgcttcggtcgtatccgtgaccttgaagctaagcacttcctgaaaaacgttgaggaacaactcaacaagcgcgtagggcacgtctacaagaaagcatttatgcaagttgtcgaggctgacatgctctctaagggtctactcggtggcgagtcgtggtcttcgtggcataaggaagactctattcatgtaggagtacgctgcatcgagatgctcattgagtcaaccggaatggttagcttacaccgccaaaatgctggcgtagtatgtaaagactctgagactatcgaactcgcacctgaatacgctgaggctatcgcaacccgtgcaggtgcgctggctggcatctctccgatgttccaaccttgcgtagttcctcctaagccgtggactggcattactggtggtggctattgggctaacggtcgtcgtcctctggcgctggtgcgtactcacagtaagaaaggtctgatgcgctacgaagacgtttacatgcctgaggtgtacaaagcgattaacattgcgcaaaacaccgcctggtcgatcaacaagtgggtcctggcggtcgccaacgtaatcaccaagtggaagcattgtccggtcgaggacatccctgcgattgagcgtgaagaactcccgatgaaaccggaagacatcgacatgaatcctgaggctctcaccgcgtggaaacgtgctaaagctgctgtgtaccgcaaggacaaggctcgcaagtctcgccgtatcttgcttgagttcatgcttgagcaagccaataagtttgctaaccataaggccatctggttcccttacaacatggactggcgcggtcgtgtttacgctgtgtcaatgttcaacccgcaaggtaacgatatgaccaaaggactgcttacgctggcgaaaggtaaaccaatcggtaaggaaggttactactggctgaaaatccacggtgcaaactgtgcgggtgtcgataaggttccgttccctgagcgcatcaagttcattgaggaaaaccacgagaacatcatggcttgcgctaagtctccactggagaacacttggtgggctgagcaagatagtccgttctgcttccttgcgttctgctttgagtacgctggggtacagcaccacggcctgagctataactgctcccttccgctggcgtttgacgggtcttgctctggcatccagcacttctccgcgatgctccgagatgaggtaggtggtcgcgcggttaacttgcttcctagtgaaaccgttcaggacatctacgggattgttgctaagaaagtcaacgagattctacaagcagacgcaatcaatgggaccgataacgaagtagttaccgtgaccgatgagaacgaaggtgaaatctctgagaaagtcaagctgggcactaaggcactggctggtcaatggctgcgttacggtgttactcgcagtgtgactaagcgttcagtcatgacgctggcttacgggtccaaagagttcggcttccgtcaacaagtgctgcgccacactattcagccagctattgattccggcaagggtctgatgttcactcagccgaatcaggctgctggatacatggctaagctgatttgggaatctgtgagcgtgacggtggtagctgcggttgaagcaatgaactggcttaagtctgctgctaagctgctggctgctgaggtcaaagataagaagactggagagattcttcgcaagcgttgcgctgtgcattgggtaactcctgatggtttccctgtgtggcaggaatacaagaagcctattcagacgcgcttgaacctgatgttcctcggtcagttccgcttacagcctaccattaacaccaacaaagatagcgagattgatgcacataaacaggagtctggtatcgctcctaactttgtacacagccaagacggtagccaccttcgtaagactgtagtgtgggcacacgagaagtacggaatcgaatcttttgcactgattcacgactccttcggtaccattccggctgacgctgcgaacctgttcaaagcagtgcgcgaaactatggttgacacatatgagtcttgtgatgtactggctgatttctacgaccagttcgctgaccagttgcacgagtctcaattggacaaaatgccagcacttccggctaaaggtaacttgaacctccgtgacatcttagagtcggacttcgcgttcgcg

SEQ ID NO: 682 - protein, 890 aa, synthetic construct
  REGION 1..890: note = Variant of RNA polymerase
MHHHHHHMNTINIAKNDFSDIELAAIPFNTLVDHYGEGLAREQLALEHESYEMGEARFRKMFERQLKAGEVADNAAAKPLITTLLPKMIARINDWFEEVKAKRGKRPTAFQFLQEIKPEAVAYITIKTTLACLTSADRTTVQAVASAIGRAIEDEARFGRIRDLEAKHFLKNVEEQLNKRVGHVYKKAFMQVVEADMLSKGLLGGESWSSWHKEDSIHVGVRCIEMLIESTGMVSLHRQNAGVVCKDSETIELAPEYAEAIATRAGALAGISPMFQPCVVPPKPWTGITGGGYWANGRRPLALVRTHSKKGLMRYEDVYMPEVYKAINIAQNTAWSINKWVLAVANVITKWKHCPVEDIPAIEREELPMKPEDIDMNPEALTAWKRAKAAVYRKDKARKSRRILLEFMLEQANKFANHKAIWFPYNMDWRGRVYAVSMFNPQGNDMTKGLLTLAKGKPIGKEGYYWLKIHGANCAGVDKVPFPERIKFIEENHENIMACAKSPLENTWWAEQDSPFCFLAFCFEYAGVQHHGLSYNCSLPLAFDGSCSGIQHFSAMLRDEVGGRAVNLLPSETVQDIYGIVAKKVNEILQADAINGTDNEVVTVTDENEGEISEKVKLGTKALAGQWLRYGVTRSVTKRSVMTLAYGSKEFGFRQQVLRHTIQPAIDSGKGLMFTQPNQAAGYMAKLIWESVSVTVVAAVEAMNWLKSAAKLLAAEVKDKKTGEILRKRCAVHWVTPDGFPVWQEYKKPIQTRLNLMFLGQFRLQPTINTNKDSEIDAHKQESGIAPNFVHSQDGSHLRKTVVWAHEKYGIESFALIHDSFGTIPADAANLFKAVRETMVDTYESCDVLADFYDQFADQLHESQLDKMPALPAKGNLNLRDILESDFAFA

SEQ ID NO: 683 - DNA, 2670 bp, synthetic construct
  misc_feature 1..2670: note = Variant of RNA polymerase
  source 1..2670: mol_type = other DNA
atgcaccatcaccatcaccatatgaacacgattaacatcgctaagaacaatttctctgacatcgaactggctgctatcccgttcaacactctggtcgaccattacggtgagggtttagctcgcgaacagttggcccttgagcatgagtcttacgaaatgggtgaagagcgtttccgcaagatgtttgagcgtcaacttaaagctggtgaggttgcggataacgctgccgccaagcctctcatcactaccctactccctaagatgattgcacgcattaacgactggtttgaggaagtgaaagctaagcgcggcaagcgcccgacagccttccagttcctgcaagaaatcaagccggaagccgtagcgtacatcaccattaagaccactctggcttgcctaaccagtgcggaccgtacaaccgttcaggctgtagcaagcgcaatcggttatgccattgaggacgaggctcgcttcggtcgtatccgtgaccttgaagctaagcacttcctgaaaaacgttgaggaacaactcaacaagcgcgtagggcacgtctacaagaaagcatttatgcaagttgttgaggctgacatgctctctaagggtctactcggtggcgaggcgtggtcttcgtggcataaggaagactctattcatgtaggagtacgctgcatcgagatgctcattgagtcaaccggaatggttagcttacaccgccaaaatgctggcgtagtaggtaaagactctgagactatcgaactcgcacctgaatacgctgaggctattgcaacccgtgcaggtgcgctggctggcatctctccgatgttccaaccttgcgtagttcctcctaagccgtggactggcattactggtggtggctattgggctaacggtcgtcgtcctctggcgctggtgcgtactcacagtaagaaaggtctgatgcgctacgaagacgtttacatgcctgaggtgtacaaagcgattaacattgcgcaaaacaccgcctggtcgatcaacaagtgggtcctggcggtcgccaacgtaatcaccaagtggaagcattgtccggtcgaggacatccctgcgattgagcgtgaagaactcccgatgaaaccggaagacatcgacatgaatcctgaggctctcaccgcgtggaaacgtgctaaagctgctgtgtaccgcaaggacaaggctcgcaagtctcgccgtatcttgcttgagttcatgcttgagcaagccaataagtttgctaaccataaggccatctggttcccttacaacatggactggcgcggtcgtgtttacgctgtgtcaatgttcaacccgcaaggtaacgatatgaccaaaggactgcttacgctggcgaaaggtaaaccaatcggtaaggaaggttactactggctgaaaatccacggtgcaaactgtgcgggtgtcgataaggttccgttccctgagcgcatcaagttcattgaggaaaaccacgagaacatcatggcttgcgctaagtctccactggagaacacttggtgggctgagcaagatagtccgttctgcttccttgcgttctgctttgagtacgctggggtacagcaccacggcctgagctataactgctcccttccgctggcgtttgacgggtcttgctctggcatccagcacttctccgcgatgctccgagatgaggtaggtggtcgcgcggttaacttgcttcctagtgaaaccgttcaggacatctacgggattgttgctaagaaagtcaacgagattctacaagcagacgcaatcaatgggaccgctaacgaagtagttaccgtgaccgatgagaacgaaggtgaaatctctgagaaagtcaagctgggcactaaggcactggctggtcaatggctggcttacggtgttactcgcagtgtgactaagcgttcagtcatgacgctggcttacgggtccaaagagttcggcttccgtcaacaagtgctgcgccacactattcagccagctattgattccggcaagggtctgatgttcactcagccgaatcaggctgctggatacatggctaagctgatttgggaatctgtgagcgtgacggtggtagctgcggttgaagcaatgaactggcttaagtctgctgctaagctgctggctgctgaggtcaaagataagaagactggagagattcttcgcaagcgttgcgctgtgcattgggtaactcctgatggtttccctgtgtggcaggaatacaagaagcctattcagacgcgcttgaacctgatgttcctcggtcagttccgcttacagcctaccattaacaccaacaaagatagcgagattgatgcacataaacaggagtctggtatcgctcctaactttgtacacagccaagacggtagccaccttcgtaagactgtagtgtgggcacacgagaagtacggaatcgaatcttttgcactgattcacgactccttcggtaccattccggctgacgctgcgaacctgttcaaagcagtgcgcgaaactatggttgacacatatgagtcttgtgatgtactggctgatttctacgaccagttcgctgaccagttgcacgagtctcaattggacaaaatgccagcacttccggctaaaggtaacttgaacctccgtgacatcttagagtcggacttcgcgttcgcg

SEQ ID NO: 684 - protein, 890 aa, synthetic construct
  REGION 1..890: note = Variant of RNA polymerase
MHHHHHHMNTINIAKNNFSDIELAAIPFNTLVDHYGEGLAREQLALEHESYEMGEERFRKMFERQLKAGEVADNAAAKPLITTLLPKMIARINDWFEEVKAKRGKRPTAFQFLQEIKPEAVAYITIKTTLACLTSADRTTVQAVASAIGYAIEDEARFGRIRDLEAKHFLKNVEEQLNKRVGHVYKKAFMQVVEADMLSKGLLGGEAWSSWHKEDSIHVGVRCIEMLIESTGMVSLHRQNAGVVGKDSETIELAPEYAEAIATRAGALAGISPMFQPCVVPPKPWTGITGGGYWANGRRPLALVRTHSKKGLMRYEDVYMPEVYKAINIAQNTAWSINKWVLAVANVITKWKHCPVEDIPAIEREELPMKPEDIDMNPEALTAWKRAKAAVYRKDKARKSRRILLEFMLEQANKFANHKAIWFPYNMDWRGRVYAVSMFNPQGNDMTKGLLTLAKGKPIGKEGYYWLKIHGANCAGVDKVPFPERIKFIEENHENIMACAKSPLENTWWAEQDSPFCFLAFCFEYAGVQHHGLSYNCSLPLAFDGSCSGIQHFSAMLRDEVGGRAVNLLPSETVQDIYGIVAKKVNEILQADAINGTANEVVTVTDENEGEISEKVKLGTKALAGQWLAYGVTRSVTKRSVMTLAYGSKEFGFRQQVLRHTIQPAIDSGKGLMFTQPNQAAGYMAKLIWESVSVTVVAAVEAMNWLKSAAKLLAAEVKDKKTGEILRKRCAVHWVTPDGFPVWQEYKKPIQTRLNLMFLGQFRLQPTINTNKDSEIDAHKQESGIAPNFVHSQDGSHLRKTVVWAHEKYGIESFALIHDSFGTIPADAANLFKAVRETMVDTYESCDVLADFYDQFADQLHESQLDKMPALPAKGNLNLRDILESDFAFA

SEQ ID NO: 685 - DNA, 2670 bp, synthetic construct
  misc_feature 1..2670: note = Variant of RNA polymerase
  source 1..2670: mol_type = other DNA
atgcaccatcaccatcaccatatgaacacgattaacatcgctaagaacgatttctctgacatcgaactggctgctatcccgttcaacactctggtcgaccattacggtgagggtttagctcgcgaacagttggcccttgagcatgagtcttacgaaatgggtgaagagcgtttccgcaagatgtttgagcgtcaacttaaagctggtgaggttgcggataacgctgccgccaagcctctcatcactaccctactccctaagatgattgcacgcattaacgactggtttgaggaagtgaaagctaagcgcggcaagcgcccgacagccttccagttcctgcaagaaatcaagccggaagccgtagcgtacatcaccattaagaccactctggcttgcctaaccagtgcggaccgtacaaccgttcaggctgtagcaagcgcaatcggtcgggccattgaggacgaggctcgcttcggtcgtatccgtgaccttgaagctaagcacttcctgaaaaacgttgaggaacaactcaacaagcgcgtagggcacgtctacaagaaagcatttatgcaagttgttgaggctgacatgctctctaagggtctactcggtggcgaggcgtggtcttcgtggcataaggaagactctattcatgtaggagtacgctgcatcgagatgctcattgagtcaaccggaatggttagcttacaccgccaaaatgctggcgtagtaggtaaagactctgagactatcgaactcgcacctgaatacgctgaggctatcgcaacccgtgcaggtgcgctggctggcatctctccgatgttccaaccttgcgtagttcctcctaagccgtggactggcattactggtggtggctattgggctaacggtcgtcgtcctctggcgctggtgcgtactcacagtaagaaaggtctgatgcgctacgaagacgtttacatgcctgaggtgtacaaagcgattaacattgcgcaaaacaccgcctggtcgatcaacaagtgggtcctggcggtcgccaacgtaatcaccaagtggaagcattgtccggtcgaggacatccctgcgattgagcgtgaagaactcccgatgaaaccggaagacatcgacatgaatcctgaggctctcaccgcgtggaaacgtgctaaagctgctgtgtaccgcaaggacaaggctcgcaagtctcgccgtatcttgcttgagttcatgcttgagcaagccaataagtttgctaaccataaggccatctggttcccttacaacatggactggcgcggtcgtgtttacgctgtgtcaatgttcaacccgcaaggtaacgatatgaccaaaggactgcttacgctggcgaaaggtaaaccaatcggtaaggaaggttactactggctgaaaatccacggtgcaaactgtgcgggtgtcgataaggttccgttccctgagcgcatcaagttcattgaggaaaaccacgagaacatcatggcttgcgctaagtctccactggagaacacttggtgggctgagcaagatagtccgttctgcttccttgcgttctgctttgagtacgctggggtacagcaccacggcctgagctataactgctcccttccgctggcgtttgacgggtcttgctctggcatccagcacttctccgcgatgctccgagatgaggtaggtggtcgcgcggttaacttgcttcctagtgaaaccgttcaggacatctacgggattgttgctaagaaagtcaacgagattctacaagcagacgcaatcaatgggaccgataacgaagtagttaccgtgaccgatgagaacgaaggtgaaatctctgagaaagtcaagctgggcactaaggcactggctggtcaatggctgcgttacggtgttactcgcagtgtgactaagcgttcagtcatgacgctggcttacgggtccaaagagttcggcttccgtcaacaagtgctgcgccacactattcagccagctattgattccggcaagggtctgatgttcactcagccgaatcaggctgctggatacatggctaagctgatttgggaatctgtgagcgtgacggtggtagctgcggttgaagcaatgaactggcttaagtctgctgctaagctgctggctgctgaggtcaaagataagaagactggagagattcttcgcaagcgttgcgctgtgcattgggtaactcctgatggtttccctgtgtggcaggaatacaagaagcctattcagacgcgcttgaacctgatgttcctcggtcagttccgcttacagcctaccattaacaccaacaaagatagcgagattgatgcacataaacaggagtctggtatcgctcctaactttgtacacagccaagacggtagccaccttcgtaagactgtagtgtgggcacacgagaagtacggaatcgaatcttttgcactgattcacgactccttcggtaccattccggctgacgctgcgaacctgttcaaagcagtgcgcgaaactatggttgacacatatgagtcttgtgatgtactggctgatttctacgaccagttcgctgaccagttgcacgagtctcaattggacaaaatgccagcacttccggctaaaggtaacttgaacctccgtgacatcttagagtcggacttcgcgttcgcg

SEQ ID NO: 686 - protein, 890 aa, synthetic construct
  REGION 1..890: note = Variant of RNA polymerase
MHHHHHHMNTINIAKNDFSDIELAAIPFNTLVDHYGEGLAREQLALEHESYEMGEERFRKMFERQLKAGEVADNAAAKPLITTLLPKMIARINDWFEEVKAKRGKRPTAFQFLQEIKPEAVAYITIKTTLACLTSADRTTVQAVASAIGRAIEDEARFGRIRDLEAKHFLKNVEEQLNKRVGHVYKKAFMQVVEADMLSKGLLGGEAWSSWHKEDSIHVGVRCIEMLIESTGMVSLHRQNAGVVGKDSETIELAPEYAEAIATRAGALAGISPMFQPCVVPPKPWTGITGGGYWANGRRPLALVRTHSKKGLMRYEDVYMPEVYKAINIAQNTAWSINKWVLAVANVITKWKHCPVEDIPAIEREELPMKPEDIDMNPEALTAWKRAKAAVYRKDKARKSRRILLEFMLEQANKFANHKAIWFPYNMDWRGRVYAVSMFNPQGNDMTKGLLTLAKGKPIGKEGYYWLKIHGANCAGVDKVPFPERIKFIEENHENIMACAKSPLENTWWAEQDSPFCFLAFCFEYAGVQHHGLSYNCSLPLAFDGSCSGIQHFSAMLRDEVGGRAVNLLPSETVQDIYGIVAKKVNEILQADAINGTDNEVVTVTDENEGEISEKVKLGTKALAGQWLRYGVTRSVTKRSVMTLAYGSKEFGFRQQVLRHTIQPAIDSGKGLMFTQPNQAAGYMAKLIWESVSVTVVAAVEAMNWLKSAAKLLAAEVKDKKTGEILRKRCAVHWVTPDGFPVWQEYKKPIQTRLNLMFLGQFRLQPTINTNKDSEIDAHKQESGIAPNFVHSQDGSHLRKTVVWAHEKYGIESFALIHDSFGTIPADAANLFKAVRETMVDTYESCDVLADFYDQFADQLHESQLDKMPALPAKGNLNLRDILESDFAFA

SEQ ID NO: 687 - DNA, 2670 bp, synthetic construct
  misc_feature 1..2670: note = Variant of RNA polymerase
  source 1..2670: mol_type = other DNA
atgcaccatcaccatcaccatatgaacacgattaacatcgctaagaacgatttctctgacatcgaactggctgctatcccgttcaacactctggtcgaccattacggtgagggtttagctcgcgaacagttggcccttgagcatgagtcttacgagatgggtgaagcacgtttccgcaagatgtttgagcgtcaacttaaagctggtgaggttgcggataacgctgccgccaagcctctcatcactaccctactccctaagatgattgcacgcattaacgactggtttgaggaagtgaaagctaagcgcggcaagcgcccgacagccttccagttcctgcaagaaatcaagccggaagccgtagcgtacatcaccattaagaccactctggcttgcctaaccagtgcggaccgtacaaccgttcaggctgtagcaagcgcaatcggtcgtgccattgaggacgaggctcgcttcggtcgtatccgtgaccttgaagctaagcacttcctgaaaaacgttgaggaacaactcaacaagcgcgtagggcacgtctacaagaaagcatttatgcaagttgtcgaggctgacatgctctctaagggtctactcggtggcgaggcgtggtcttcgtggcataaggaagactctattcatgtaggagtacgctgcatcgagatgctcattgagtcaaccggaatggttagcttacaccgccaaaatgctggcgtagtaggtaaagactctgagactatcgaactcgcacctgaatacgctgaggctattgcaacccgtgcaggtgcgctggctggcatctctccgatgttccaaccttgcgtagttcctcctaagccgtggactggcattactggtggtggctattgggctaacggtcgtcgtcctctggcgctggtgcgtactcacagtaagaaaggtctgatgcgctacgaagacgtttacatgcctgaggtgtacaaagcgattaacattgcgcaaaacaccgcctggtcgatcaacaagtgggtcctggcggtcgccaacgtaatcaccaagtggaagcattgtccggtcgaggacatccctgcgattgagcgtgaagaactcccgatgaaaccggaagacatcgacatgaatcctgaggctctcaccgcgtggaaacgtgctaaagctgctgtgtaccgcaaggacaaggctcgcaagtctcgccgtatcttgcttgagttcatgcttgagcaagccaataagtttgctaaccataaggccatctggttcccttacaacatggactggcgcggtcgtgtttacgctgtgtcaatgttcaacccgcaaggtaacgatatgaccaaaggactgcttacgctggcgaaaggtaaaccaatcggtaaggaaggttactactggctgaaaatccacggtgcaaactgtgcgggtgtcgataaggttccgttccctgagcgcatcaagttcattgaggaaaaccacgagaacatcatggcttgcgctaagtctccactggagaacacttggtgggctgagcaagatagtccgttctgcttccttgcgttctgctttgagtacgctggggtacagcaccacggcctgagctatgtatgctcccttccgctggcgtttgacgggtcttgctctggcatccagcacttctccgcgatgctccgagatgaggtaggtggtcgcgcggttaacttgcttcctagtgaaaccgttcaggacatctacgggattgttgctaagaaagtcaacgagattctacaagcagacgcaatcaatgggaccgataacgaagtagttaccgtgaccgatgagaacgaaggtgaaatctctgagaaagtcaagctgggcactaaggcactggctggtcaatggctggcttacggtgttactcgcagtgtgactaagcgttcagtcatgacgctggcttacgggtccaaagagttcggcttccgtcaacaagtgctgcgccacactattcagccagctattgattccggcaagggtctgatgttcactcagccgaatcaggctgctggatacatggctaagctgatttgggaatctgtgagcgtgacggtggtagctgcggttgaagcaatgaactggcttaagtctgctgctaagctgctggctgctgaggtcaaagataagaagactggagagattcttcgcaagcgttgcgctgtgcattgggtaactcctgatggtttccctgtgtggcaggaatacaagaagcctattcagacgcgcttgaacctgatgttcctcggtcagttccgcttacagcctaccattaacaccaacaaagatagcgagattgatgcacataaacaggagtctggtatcgctcctaactttgtacacagccaagacggtagccaccttcgtaagactgtagtgtgggcacacgagaagtacggaatcgaatcttttgcactgattcacgactccttcggtaccattccggctgacgctgcgaacctgttcaaagcagtgcgcgaaactatggttgacacatatgagtcttgtgatgtactggctgatttctacgaccagttcgctgaccagttgcacgagtctcaattggacaaaatgccagcacttccggctaaaggtaacttgaacctccgtgacatcttagagtcggacttcgcgttcgcg

SEQ ID NO: 688 - protein, 890 aa, synthetic construct
  REGION 1..890: note = Variant of RNA polymerase
MHHHHHHMNTINIAKNDFSDIELAAIPFNTLVDHYGEGLAREQLALEHESYEMGEARFRKMFERQLKAGEVADNAAAKPLITTLLPKMIARINDWFEEVKAKRGKRPTAFQFLQEIKPEAVAYITIKTTLACLTSADRTTVQAVASAIGRAIEDEARFGRIRDLEAKHFLKNVEEQLNKRVGHVYKKAFMQVVEADMLSKGLLGGEAWSSWHKEDSIHVGVRCIEMLIESTGMVSLHRQNAGVVGKDSETIELAPEYAEAIATRAGALAGISPMFQPCVVPPKPWTGITGGGYWANGRRPLALVRTHSKKGLMRYEDVYMPEVYKAINIAQNTAWSINKWVLAVANVITKWKHCPVEDIPAIEREELPMKPEDIDMNPEALTAWKRAKAAVYRKDKARKSRRILLEFMLEQANKFANHKAIWFPYNMDWRGRVYAVSMFNPQGNDMTKGLLTLAKGKPIGKEGYYWLKIHGANCAGVDKVPFPERIKFIEENHENIMACAKSPLENTWWAEQDSPFCFLAFCFEYAGVQHHGLSYVCSLPLAFDGSCSGIQHFSAMLRDEVGGRAVNLLPSETVQDIYGIVAKKVNEILQADAINGTDNEVVTVTDENEGEISEKVKLGTKALAGQWLAYGVTRSVTKRSVMTLAYGSKEFGFRQQVLRHTIQPAIDSGKGLMFTQPNQAAGYMAKLIWESVSVTVVAAVEAMNWLKSAAKLLAAEVKDKKTGEILRKRCAVHWVTPDGFPVWQEYKKPIQTRLNLMFLGQFRLQPTINTNKDSEIDAHKQESGIAPNFVHSQDGSHLRKTVVWAHEKYGIESFALIHDSFGTIPADAANLFKAVRETMVDTYESCDVLADFYDQFADQLHESQLDKMPALPAKGNLNLRDILESDFAFA

SEQ ID NO: 689 - DNA, 2670 bp, synthetic construct
  misc_feature 1..2670: note = Variant of RNA polymerase
  source 1..2670: mol_type = other DNA
atgcaccatcaccatcaccatatgaacacgattaacatcgctaagaacgacttctctgacatcgaactggctgctatcccgttcaacactctggtcgaccattacggtgagggtttagctcgcgaacagttggcccttgagcatgagtcttacgagatgggtgaagcacgtttccgcaagatgtttgagcgtcaacttaaagctggtgaggttgcggataacgctgccgccaagcctctcatcactaccctactccctaagatgattgcacgcatcaacgactggtttgaggaagtgaaagctaagcgcggcaagcgcccgacagccttccagttcctgcaagaaatcaagccggaagccgtagcgtacatcaccattaagaccactctggcttgcctaaccagtgcggaccgtacaaccgttcaggctgtagcaagcgcaatcggtcgggccattgaggacgaggctcgcttcggtcgtatccgtgaccttgaagctaagcacttcctgaaaaacgttgaggaacaactcaacaagcgcgtagggcacgtcccgaagaaagcatttatgcaagttgtcgaggctgacatgctctctaagggtctactcggtggcgaggcgtggtcttcgtggcataaggaagactctattcatgtaggagtacgctgcatcgagatgctcattgagtcaaccggaatggttagcttacaccgccaaaatgctggcgtagtaggtaaagactctgagactatcgaactcgcacctgaatacgctgaggctatcgcaacccgtgcaggtgcgctggctggcatctctccgatgttccaaccttgcgtagttcctcctaagccgtggactggcattactggtggtggctattgggctaacggtcgtcgtcctctggcgctggtgcgtactcacagtaagaaaggtctgatgcgctacgaagacgtttacatgcctgaggtgtacaaagcgattaacattgcgcaaaacaccgcctggtcgatcaacaagtgggtcctggcggtcgccaacgtaatcaccaagtggaagcattgtccggtcgaggacatccctgcgattgagcgtgaagaactcccgatgaaaccggaagacatcgacatgaatcctgaggctctcaccgcgtggaaacgtgctaaagctgctgtgtaccgcaaggacaaggctcgcaagtctcgccgtatcttgcttgagttcatgcttgagcaagccaataagtttgctaaccataaggccatctggttcccttacaacatggactggcgcggtcgtgtttacgctgtgtcaatgttcaacccgcaaggtaacgatatgaccaaaggactgcttacgctggcgaaaggtaaaccaatcggtaaggaaggttactactggctgaaaatccacggtgcaaactgtgcgggtgtcgataaggttccgttccctgagcgcatcaagttcattgaggaaaaccacgagaacatcatggcttgcgctaagtctccactggagaacacttggtgggctgagcaagatagtccgttctgcttccttgcgttctgctttgagtacgctggggtacagcaccacggcctgagctataactgctcccttccgctggcgtttgacgggtcttgctctggcatccagcacttctccgcgatgctccgagatgaggtaggtggtcgcgcggttaacttgcttcctagtgaaaccgttcaggacatctacgggattgttgctaagaaagtcaacgagattctacaagcagacgcaatcaatgggaccgataacgaagtagttaccgtgaccgatgagaacgaaggtgaaatctctgagaaggtcaagctgggcactaaggcactggctggtcaatggctggcttacggtgttactcgcagtgtgactaagcgttcagtcatgacgctggcttacgggtccaaagagttcggcttccgtcaacaagtgctgcgccacactattcagccagctattgattccggcaagggtctgatgttcactcagccgaatcaggctgctggatacatggctaagctgatttgggaatctgtgagcgtgacggtggtagctgcggttgaagcaatgaactggcttaagtctgctgctaagctgctggctgctgaggtcaaagataagaagactggagagattcttcgcaagcgttgcgctgtgcattgggtaactcctgatggtttccctgtgtggcaggaatacaagaagcctattcagacgcgcttgaacctgatgttcctcggtcagttccgcttacagcctaccattaacaccaacaaagatagcgagattgatgcacataaacaggagtctggtatcgctcctaactttgtacacagccaagacggtagccaccttcgtaagactgtagtgtgggcacacgagaagtacggaatcgaatcttttgcactgattcacgactccttcggtaccattccggctgacgctgcgaacctgttcaaagcagtgcgcgaaactatggttgacacatatgagtcttgtgatgtactggctgatttctacgaccagttcgctgaccagttgcacgagtctcaattggacaaaatgccagcacttccggctaaaggtaacttgaacctccgtgacatcttagagtcggacttcgcgttcgcg

SEQ ID NO: 690 - protein, 890 aa, synthetic construct
  REGION 1..890: note = Variant of RNA polymerase
MHHHHHHMNTINIAKNDFSDIELAAIPFNTLVDHYGEGLAREQLALEHESYEMGEARFRKMFERQLKAGEVADNAAAKPLITTLLPKMIARINDWFEEVKAKRGKRPTAFQFLQEIKPEAVAYITIKTTLACLTSADRTTVQAVASAIGRAIEDEARFGRIRDLEAKHFLKNVEEQLNKRVGHVPKKAFMQVVEADMLSKGLLGGEAWSSWHKEDSIHVGVRCIEMLIESTGMVSLHRQNAGVVGKDSETIELAPEYAEAIATRAGALAGISPMFQPCVVPPKPWTGITGGGYWANGRRPLALVRTHSKKGLMRYEDVYMPEVYKAINIAQNTAWSINKWVLAVANVITKWKHCPVEDIPAIEREELPMKPEDIDMNPEALTAWKRAKAAVYRKDKARKSRRILLEFMLEQANKFANHKAIWFPYNMDWRGRVYAVSMFNPQGNDMTKGLLTLAKGKPIGKEGYYWLKIHGANCAGVDKVPFPERIKFIEENHENIMACAKSPLENTWWAEQDSPFCFLAFCFEYAGVQHHGLSYNCSLPLAFDGSCSGIQHFSAMLRDEVGGRAVNLLPSETVQDIYGIVAKKVNEILQADAINGTDNEVVTVTDENEGEISEKVKLGTKALAGQWLAYGVTRSVTKRSVMTLAYGSKEFGFRQQVLRHTIQPAIDSGKGLMFTQPNQAAGYMAKLIWESVSVTVVAAVEAMNWLKSAAKLLAAEVKDKKTGEILRKRCAVHWVTPDGFPVWQEYKKPIQTRLNLMFLGQFRLQPTINTNKDSEIDAHKQESGIAPNFVHSQDGSHLRKTVVWAHEKYGIESFALIHDSFGTIPADAANLFKAVRETMVDTYESCDVLADFYDQFADQLHESQLDKMPALPAKGNLNLRDILESDFAFA

SEQ ID NO: 691 - DNA, 2670 bp, synthetic construct
  misc_feature 1..2670: note = Variant of RNA polymerase
  source 1..2670: mol_type = other DNA
atgcaccatcaccatcaccatatgaacacgattaacatcgctaagaacgacttctctgacatcgaactggctgctatcccgttcaacactctggtcgaccattacggtgagggtttagctcgcgaacagttggcccttgagcatgagtcttacgaaatgggtgaaactcgtttccgcaagatgtttgagcgtcaacttaaagctggtgaggttgcggataacgctgccgccaagcctctcatcactaccctactccctaagatgattgcacgcattaacgactggtttgaggaagtgaaagctaagcgcggcaagcgcccgacagccttccagttcctgcaagaaatcaagccggaagccgtagcgtacatcaccattaagaccactctggcttgcctaaccagtgcggaccgtacaaccgttcaggctgtagcaagcgcaatcggttatgccattgaggacgaggctcgcttcggtcgtatccgtgaccttgaagctaagcacttcctgaaaaacgttgaggaacaactcaacaagcgcgtagggcacgtctacaagaaagcatttatgcaagttgtcgaggctgacatgctctctaagggtctactcggtggcgaggcgtggtcttcgtggcataaggaagactctattcatgtaggagtacgctgcatcgagatgctcattgagtcaaccggaatggttagcttacaccgccaaaatgctggcgtagtaggtaaagactctgagactatcgaactcgcacctgaatacgctgaggctattgcaacccgtgcaggtgcgctggctggcatctctccgatgttccaaccttgcgtagttcctcctaagccgtggactggcattactggtggtggctattgggctaacggtcgtcgtcctctggcgctggtgcgtactcacagtaagaaaggtctgatgcgctacgaagacgtttacatgcctgaggtgtacaaagcgattaacattgcgcaaaacaccgcctggtcgatcaacaagtgggtcctggcggtcgccaacgtaatcaccaagtggaagcattgtccggtcgaggacatccctgcgattgagcgtgaagaactcccgatgaaaccggaagacatcgacatgaatcctgaggctctcaccgcgtggaaacgtgctaaagctgctgtgtaccgcaaggacaaggctcgcaagtctcgccgtatcttgcttgagttcatgcttgagcaagccaataagtttgctaaccataaggccatctggttcccttacaacatggactggcgcggtcgtgtttacgctgtgtcaatgttcaacccgcaaggtaacgatatgaccaaaggactgcttacgctggcgaaaggtaaaccaatcggtaaggaaggttactactggctgaaaatccacggtgcaaactgtgcgggtgtcgataaggttccgttccctgagcgcatcaagttcattgaggaaaaccacgagaacatcatggcttgcgctaagtctccactggagaacacttggtgggctgagcaagatagtccgttctgcttccttgcgttctgctttgagtacgctggggtacagcaccacggcctgagctataactgctcccttccgctggcgtttgacgggtcttgctctggcatccagcacttctccgcgatgctccgagatgaggtaggtggtcgcgcggttaacttgcttcctagtgaaaccgttcaggacatctacgggattgttgctaagaaagtcaacgagattctacaagcagacgcaatcaatgggaccgataacgaagtagttaccgtgaccgatgagaacgaaggtgaaatctctgagaaagtcaagctgggcactaaggcactggctggtcaatggctggcatacggtgttactcgcagtgtgactaagcgttcagtcatgacgctggcttacgggtccaaagagttcggcttccgtcaacaagtgctgcgccacactattcagccagctattgattccggcaagggtctgatgttcactcagccgaatcaggctgctggatacatggctaagctgatttgggaatctgtgagcgtgacggtggtagctgcggttgaagcaatgaactggcttaagtctgctgctaagctgctggctgctgaggtcaaagataagaagactggagagattcttcgcaagcgttgcgctgtgcattgggtaactcctgatggtttccctgtgtggcaggaatacaagaagcctattcagacgcgcttgaacctgatgttcctcggtcagttccgcttacagcctaccattaacaccaacaaagatagcgagattgatgcacataaacaggagtctggtatcgctcctaactttgtacacagccaagacggtagccaccttcgtaagactgtagtgtgggcacacgagaagtacggaatcgaatcttttgcactgattcacgactccttcggtaccattccggctgacgctgcgaacctgttcaaagcagtgcgcgaaactatggttgacacatatgagtcttgtgatgtactggctgatttctacgaccagttcgctgaccagttgcacgagtctcaattggacaaaatgccagcacttccggctaaaggtaacttgaacctccgtgacatcttagagtcggacttcgcgttcgcg

SEQ ID NO: 692 - protein, 890 aa, synthetic construct
  REGION 1..890: note = Variant of RNA polymerase
MHHHHHHMNTINIAKNDFSDIELAAIPFNTLVDHYGEGLAREQLALEHESYEMGETRFRKMFERQLKAGEVADNAAAKPLITTLLPKMIARINDWFEEVKAKRGKRPTAFQFLQEIKPEAVAYITIKTTLACLTSADRTTVQAVASAIGYAIEDEARFGRIRDLEAKHFLKNVEEQLNKRVGHVYKKAFMQVVEADMLSKGLLGGEAWSSWHKEDSIHVGVRCIEMLIESTGMVSLHRQNAGVVGKDSETIELAPEYAEAIATRAGALAGISPMFQPCVVPPKPWTGITGGGYWANGRRPLALVRTHSKKGLMRYEDVYMPEVYKAINIAQNTAWSINKWVLAVANVITKWKHCPVEDIPAIEREELPMKPEDIDMNPEALTAWKRAKAAVYRKDKARKSRRILLEFMLEQANKFANHKAIWFPYNMDWRGRVYAVSMFNPQGNDMTKGLLTLAKGKPIGKEGYYWLKIHGANCAGVDKVPFPERIKFIEENHENIMACAKSPLENTWWAEQDSPFCFLAFCFEYAGVQHHGLSYNCSLPLAFDGSCSGIQHFSAMLRDEVGGRAVNLLPSETVQDIYGIVAKKVNEILQADAINGTDNEVVTVTDENEGEISEKVKLGTKALAGQWLAYGVTRSVTKRSVMTLAYGSKEFGFRQQVLRHTIQPAIDSGKGLMFTQPNQAAGYMAKLIWESVSVTVVAAVEAMNWLKSAAKLLAAEVKDKKTGEILRKRCAVHWVTPDGFPVWQEYKKPIQTRLNLMFLGQFRLQPTINTNKDSEIDAHKQESGIAPNFVHSQDGSHLRKTVVWAHEKYGIESFALIHDSFGTIPADAANLFKAVRETMVDTYESCDVLADFYDQFADQLHESQLDKMPALPAKGNLNLRDILESDFAFA

SEQ ID NO: 693 - DNA, 2670 bp, synthetic construct
  misc_feature 1..2670: note = Variant of RNA polymerase
  source 1..2670: mol_type = other DNA
atgcaccatcaccatcaccatatgaacacgattaacatcgctaagaacaatttctctgacatcgaactggctgctatcccgttcaacactctggtcgaccattacggtgagggtttagctcgcgaacagttggcccttgagcatgagtcttacgagatgggtgaagagcgtttccgcaagatgtttgagcgtcaacttaaagctggtgaggttgcggataacgctgccgccaagcctctcatcactaccctactccctaagatgattgcacgcatcaacgactggtttgaggaagtgaaagctaagcgcggcaagcgcccgacagccttccagttcctgcaagaaatcaagccggaagccgtagcgtacatcaccattaagaccactctggcttgcctaaccagtgcggaccgtacaaccgttcaggctgtagcaagcgcaatcggttatgccattgaggacgaggctcgcttcggtcgtatccgtgaccttgaagctaagcacttcctgaaaaacgttgaggaacaactcaacaagcgcgtagggcacgtctacaagaaagcatttatgcaagttgttgaggctgacatgctctctaagggtctactcggtggcgagtcgtggtcttcgtggcataaggaagactctattcatgtaggagtacgctgcatcgagatgctcattgagtcaaccggaatggttagcttacaccgccaaaatgctggcgtagtatgtaaagactctgagactatcgaactcgcacctgaatacgctgaggctattgcaacccgtgcaggtgcgctggctggcatctctccgatgttccaaccttgcgtagttcctcctaagccgtggactggcattactggtggtggctattgggctaacggtcgtcgtcctctggcgctggtgcgtactcacagtaagaaaggtctgatgcgctacgaagacgtttacatgcctgaggtgtacaaagcgattaacattgcgcaaaacaccgcctggtcgatcaacaagtgggtcctggcggtcgccaacgtaatcaccaagtggaagcattgtccggtcgaggacatccctgcgattgagcgtgaagaactcccgatgaaaccggaagacatcgacatgaatcctgaggctctcaccgcgtggaaacgtgctaaagctgctgtgtaccgcaaggacaaggctcgcaagtctcgccgtatcttgcttgagttcatgcttgagcaagccaataagtttgctaaccataaggccatctggttcccttacaacatggactggcgcggtcgtgtttacgctgtgtcaatgttcaacccgcaaggtaacgatatgaccaaaggactgcttacgctggcgaaaggtaaaccaatcggtaaggaaggttactactggctgaaaatccacggtgcaaactgtgcgggtgtcgataaggttccgttccctgagcgcatcaagttcattgaggaaaaccacgagaacatcatggcttgcgctaagtctccactggagaacacttggtgggctgagcaagatagtccgttctgcttccttgcgttctgctttgagtacgctggggtacagcaccacggcctgagctataactgctcccttccgctggcgtttgacgggtcttgctctggcatccagcacttctccgcgatgctccgagatgaggtaggtggtcgcgcggttaacttgcttcctagtgaaaccgttcaggacatctacgggattgttgctaagaaagtcaacgagattctacaagcagacgcaatcaatgggaccgctaacgaagtagttaccgtgaccgatgagaacgaaggtgaaatctctgagaaagtccgcctgggcactaaggcactggctggtcaatggctgcgttacggtgttactcgcagtgtgactaagcgttcagtcatgacgctggcttacgggtccaaagagttcggcttccgtcaacaagtgctgcgccacactattcagccagctattgattccggcaagggtctgatgttcactcagccgaatcaggctgctggatacatggctaagctgatttgggaatctgtgagcgtgacggtggtagctgcggttgaagcaatgaactggcttaagtctgctgctaagctgctggctgctgaggtcaaagataagaagactggagagattcttcgcaagcgttgcgctgtgcattgggtaactcctgatggtttccctgtgtggcaggaatacaagaagcctattcagacgcgcttgaacctgatgttcctcggtcagttccgcttacagcctaccattaacaccaacaaagatagcgagattgatgcacataaacaggagtctggtatcgctcctaactttgtacacagccaagacggtagccaccttcgtaagactgtagtgtgggcacacgagaagtacggaatcgaatcttttgcactgattcacgactccttcggtaccattccggctgacgctgcgaacctgttcaaagcagtgcgcgaaactatggttgacacatatgagtcttgtgatgtactggctgatttctacgaccagttcgctgaccagttgcacgagtctcaattggacaaaatgccagcacttccggctaaaggtaacttgaacctccgtgacatcttagagtcggacttcgcgttcgcg

SEQ ID NO: 694 - protein, 890 aa, synthetic construct
  REGION 1..890: note = Variant of RNA polymerase
MHHHHHHMNTINIAKNNFSDIELAAIPFNTLVDHYGEGLAREQLALEHESYEMGEERFRKMFERQLKAGEVADNAAAKPLITTLLPKMIARINDWFEEVKAKRGKRPTAFQFLQEIKPEAVAYITIKTTLACLTSADRTTVQAVASAIGYAIEDEARFGRIRDLEAKHFLKNVEEQLNKRVGHVYKKAFMQVVEADMLSKGLLGGESWSSWHKEDSIHVGVRCIEMLIESTGMVSLHRQNAGVVCKDSETIELAPEYAEAIATRAGALAGISPMFQPCVVPPKPWTGITGGGYWANGRRPLALVRTHSKKGLMRYEDVYMPEVYKAINIAQNTAWSINKWVLAVANVITKWKHCPVEDIPAIEREELPMKPEDIDMNPEALTAWKRAKAAVYRKDKARKSRRILLEFMLEQANKFANHKAIWFPYNMDWRGRVYAVSMFNPQGNDMTKGLLTLAKGKPIGKEGYYWLKIHGANCAGVDKVPFPERIKFIEENHENIMACAKSPLENTWWAEQDSPFCFLAFCFEYAGVQHHGLSYNCSLPLAFDGSCSGIQHFSAMLRDEVGGRAVNLLPSETVQDIYGIVAKKVNEILQADAINGTANEVVTVTDENEGEISEKVRLGTKALAGQWLRYGVTRSVTKRSVMTLAYGSKEFGFRQQVLRHTIQPAIDSGKGLMFTQPNQAAGYMAKLIWESVSVTVVAAVEAMNWLKSAAKLLAAEVKDKKTGEILRKRCAVHWVTPDGFPVWQEYKKPIQTRLNLMFLGQFRLQPTINTNKDSEIDAHKQESGIAPNFVHSQDGSHLRKTVVWAHEKYGIESFALIHDSFGTIPADAANLFKAVRETMVDTYESCDVLADFYDQFADQLHESQLDKMPALPAKGNLNLRDILESDFAFA

SEQ ID NO: 695 - DNA, 2670 bp, synthetic construct
  misc_feature 1..2670: note = Variant of RNA polymerase
  source 1..2670: mol_type = other DNA
atgcaccatcaccatcaccatatgaacacgattaacatcgctaagaacgacttctctgacatcgaactggctgctatcccgttcaacactctggtcgaccattacggtgagggtttagctcgcgaacagttggcccttgagcatgagtcttacgaaatgggtgaagagcgtttccgcaagatgtttgagcgtcaacttaaagctggtgaggttgcggataacgctgccgccaagcctctcatcactaccctactccctaagatgattgcacgcatcaacgactggtttgaggaagtgaaagctaagcgcggcaagcgcccgacagccttccagttcctgcaagaaatcaagccggaagccgtagcgtacatcaccattaagaccactctggcttgcctaaccagtgcggaccgtacaaccgttcaggctgtagcaagcgcaatcggttatgccattgaggacgaggctcgcttcggtcgtatccgtgaccttgaagctaagcacttcctgaaaaacgttgaggaacaactcaacaagcgcgtagggcacgtctacaagaaagcatttatgcaagttgtcgaggctgacatgctctctaagggtctactcggtggcgaggcgtggtcttcgtggcataaggaagactctattcatgtaggagtacgctgcatcgagatgctcattgagtcaaccggaatggttagcttacaccgccaaaatgctggcgtagtaggtaaagactctgagactatcgaactcgcacctgaatacgctgaggctatcgcaacccgtgcaggtgcgctggctggcatctctccgatgttccaaccttgcgtagttcctcctaagccgtggactggcattactggtggtggctattgggctaacggtcgtcgtcctctggcgctggtgcgtactcacagtaagaaaggtctgatgcgctacgaagacgtttacatgcctgaggtgtacaaagcgattaacattgcgcaaaacaccgcctggtcgatcaacaagtgggtcctggcggtcgccaacgtaatcaccaagtggaagcattgtccggtcgaggacatccctgcgattgagcgtgaagaactcccgatgaaaccggaagacatcgacatgaatcctgaggctctcaccgcgtggaaacgtgctaaagctgctgtgtaccgcaaggacaaggctcgcaagtctcgccgtatcttgcttgagttcatgcttgagcaagccaataagtttgctaaccataaggccatctggttcccttacaacatggactggcgcggtcgtgtttacgctgtgtcaatgttcaacccgcaaggtaacgatatgaccaaaggactgcttacgctggcgaaaggtaaaccaatcggtaaggaaggttactactggctgaaaatccacggtgcaaactgtgcgggtgtcgataaggttccgttccctgagcgcatcaagttcattgaggaaaaccacgagaacatcatggcttgcgctaagtctccactggagaacacttggtgggctgagcaagatagtccgttctgcttccttgcgttctgctttgagtacgctggggtacagcaccacggcctgagctatgtatgctcccttccgctggcgtttgacgggtcttgctctggcatccagcacttctccgcgatgctccgagatgaggtaggtggtcgcgcggttaacttgcttcctagtgaaaccgttcaggacatctacgggattgttgctaagaaagtcaacgagattctacaagcagacgcaatcaatgggaccaaaaacgaagtagttaccgtgaccgatgagaacgaaggtgaaatctctgagaaagtcaagctgggcactaaggcactggctggtcaatggctggcatacggtgttactcgcagtgtgactaagcgttcagtcatgacgctggcttacgggtccaaagagttcggcttccgtcaacaagtgctgcgccacactattcagccagctattgattccggcaagggtctgatgttcactcagccgaatcaggctgctggatacatggctaagctgatttgggaatctgtgagcgtgacggtggtagctgcggttgaagcaatgaactggcttaagtctgctgctaagctgctggctgctgaggtcaaagataagaagactggagagattcttcgcaagcgttgcgctgtgcattgggtaactcctgatggtttccctgtgtggcaggaatacaagaagcctattcagacgcgcttgaacctgatgttcctcggtcagttccgcttacagcctaccattaacaccaacaaagatagcgagattgatgcacataaacaggagtctggtatcgctcctaactttgtacacagccaagacggtagccaccttcgtaagactgtagtgtgggcacacgagaagtacggaatcgaatcttttgcactgattcacgactccttcggtaccattccggctgacgctgcgaacctgttcaaagcagtgcgcgaaactatggttgacacatatgagtcttgtgatgtactggctgatttctacgaccagttcgctgaccagttgcacgagtctcaattggacaaaatgccagcacttccggctaaaggtaacttgaacctccgtgacatcttagagtcggacttcgcgttcgcg

SEQ ID NO: 696 - protein, 890 aa, synthetic construct
  REGION 1..890: note = Variant of RNA polymerase
MHHHHHHMNTINIAKNDFSDIELAAIPFNTLVDHYGEGLAREQLALEHESYEMGEERFRKMFERQLKAGEVADNAAAKPLITTLLPKMIARINDWFEEVKAKRGKRPTAFQFLQEIKPEAVAYITIKTTLACLTSADRTTVQAVASAIGYAIEDEARFGRIRDLEAKHFLKNVEEQLNKRVGHVYKKAFMQVVEADMLSKGLLGGEAWSSWHKEDSIHVGVRCIEMLIESTGMVSLHRQNAGVVGKDSETIELAPEYAEAIATRAGALAGISPMFQPCVVPPKPWTGITGGGYWANGRRPLALVRTHSKKGLMRYEDVYMPEVYKAINIAQNTAWSINKWVLAVANVITKWKHCPVEDIPAIEREELPMKPEDIDMNPEALTAWKRAKAAVYRKDKARKSRRILLEFMLEQANKFANHKAIWFPYNMDWRGRVYAVSMFNPQGNDMTKGLLTLAKGKPIGKEGYYWLKIHGANCAGVDKVPFPERIKFIEENHENIMACAKSPLENTWWAEQDSPFCFLAFCFEYAGVQHHGLSYVCSLPLAFDGSCSGIQHFSAMLRDEVGGRAVNLLPSETVQDIYGIVAKKVNEILQADAINGTKNEVVTVTDENEGEISEKVKLGTKALAGQWLAYGVTRSVTKRSVMTLAYGSKEFGFRQQVLRHTIQPAIDSGKGLMFTQPNQAAGYMAKLIWESVSVTVVAAVEAMNWLKSAAKLLAAEVKDKKTGEILRKRCAVHWVTPDGFPVWQEYKKPIQTRLNLMFLGQFRLQPTINTNKDSEIDAHKQESGIAPNFVHSQDGSHLRKTVVWAHEKYGIESFALIHDSFGTIPADAANLFKAVRETMVDTYESCDVLADFYDQFADQLHESQLDKMPALPAKGNLNLRDILESDFAFA

SEQ ID NO: 697 - DNA, 2670 bp, synthetic construct
  misc_feature 1..2670: note = Variant of RNA polymerase
  source 1..2670: mol_type = other DNA
atgcaccatcaccatcaccatatgaacacgattaacatcgctaagaacgatttctctgacatcgaactggctgctatcccgttcaacactctggtcgaccattacggtgagggtttagctcgcgaacagttggcccttgagcatgagtcttacgagatgggtgaagtgcgtttccgcaagatgtttgagcgtcaacttaaagctggtgaggttgcggataacgctgccgccaagcctctcatcactaccctactccctaagatgattgcacgcatcaacgactggtttgaggaagtgaaagctaagcgcggcaagcgcccgacagccttccagttcctgcaagaaatcaagccggaagccgtagcgtacatcaccattaagaccactctggcttgcctaaccagtgcggaccgtacaaccgttcaggctgtagcaagcgcaatcggtcgtgccattgaggacgaggctcgcttcggtcgtatccgtgaccttgaagctaagcacttcctgaaaaacgttgaggaacaactcaacaagcgcgtagggcacgtctacaagaaagcatttatgcaagttgttgaggctgacatgctctctaagggtctactcggtggcgaggcgtggtcttcgtggcataaggaagactctattcatgtaggagtacgctgcatcgagatgctcattgagtcaaccggaatggttagcttacaccgccaaaatgctggcgtagtaggtaaagactctgagactatcgaactcgcacctgaatacgctgaggctatcgcaacccgtgcaggtgcgctggctggcatctctccgatgttccaaccttgcgtagttcctcctaagccgtggactggcattactggtggtggctattgggctaacggtcgtcgtcctctggcgctggtgcgtactcacagtaagaaaggtctgatgcgctacgaagacgtttacatgcctgaggtgtacaaagcgattaacattgcgcaaaacaccgcctggtcgatcaacaagtgggtcctggcggtcgccaacgtaatcaccaagtggaagcattgtccggtcgaggacatccctgcgattgagcgtgaagaactcccgatgaaaccggaagacatcgacatgaatcctgaggctctcaccgcgtggaaacgtgctaaagctgctgtgtaccgcaaggacaaggctcgcaagtctcgccgtatcttgcttgagttcatgcttgagcaagccaataagtttgctaaccataaggccatctggttcccttacaacatggactggcgcggtcgtgtttacgctgtgtcaatgttcaacccgcaaggtaacgatatgaccaaaggactgcttacgctggcgaaaggtaaaccaatcggtaaggaaggttactactggctgaaaatccacggtgcaaactgtgcgggtgtcgataaggttccgttccctgagcgcatcaagttcattgaggaaaaccacgagaacatcatggcttgcgctaagtctccactggagaacacttggtgggctgagcaagatagtccgttctgcttccttgcgttctgctttgagtacgctggggtacagcaccacggcctgagctatgtatgctcccttccgctggcgtttgacgggtcttgctctggcatccagcacttctccgcgatgctccgagatgaggtaggtggtcgcgcggttaacttgcttcctagtgaaaccgttcaggacatctacgggattgttgctaagaaagtcaacgagattctacaagcagacgcaatcaatgggaccgataacgaagtagttaccgtgaccgatgagaacgaaggtgaaatctctgagaaagtcaagctgggcactaaggcactggctggtcaatggctggcttacggtgttactcgcagtgtgactaagcgttcagtcatgacgctggcttacgggtccaaagagttcggcttccgtcaacaagtgctgcgccacactattcagccagctattgattccggcaagggtctgatgttcactcagccgaatcaggctgctggatacatggctaagctgatttgggaatctgtgagcgtgacggtggtagctgcggttgaagcaatgaactggcttaagtctgctgctaagctgctggctgctgaggtcaaagataagaagactggagagattcttcgcaagcgttgcgctgtgcattgggtaactcctgatggtttccctgtgtggcaggaatacaagaagcctattcagacgcgcttgaacctgatgttcctcggtcagttccgcttacagcctaccattaacaccaacaaagatagcgagattgatgcacataaacaggagtctggtatcgctcctaactttgtacacagccaagacggtagccaccttcgtaagactgtagtgtgggcacacgagaagtacggaatcgaatcttttgcactgattcacgactccttcggtaccattccggctgacgctgcgaacctgttcaaagcagtgcgcgaaactatggttgacacatatgagtcttgtgatgtactggctgatttctacgaccagttcgctgaccagttgcacgagtctcaattggacaaaatgccagcacttccggctaaaggtaacttgaacctccgtgacatcttagagtcggacttcgcgttcgcg

SEQ ID NO: 698 - protein, 890 aa, synthetic construct
  REGION 1..890: note = Variant of RNA polymerase
MHHHHHHMNTINIAKNDFSDIELAAIPFNTLVDHYGEGLAREQLALEHESYEMGEVRFRKMFERQLKAGEVADNAAAKPLITTLLPKMIARINDWFEEVKAKRGKRPTAFQFLQEIKPEAVAYITIKTTLACLTSADRTTVQAVASAIGRAIEDEARFGRIRDLEAKHFLKNVEEQLNKRVGHVYKKAFMQVVEADMLSKGLLGGEAWSSWHKEDSIHVGVRCIEMLIESTGMVSLHRQNAGVVGKDSETIELAPEYAEAIATRAGALAGISPMFQPCVVPPKPWTGITGGGYWANGRRPLALVRTHSKKGLMRYEDVYMPEVYKAINIAQNTAWSINKWVLAVANVITKWKHCPVEDIPAIEREELPMKPEDIDMNPEALTAWKRAKAAVYRKDKARKSRRILLEFMLEQANKFANHKAIWFPYNMDWRGRVYAVSMFNPQGNDMTKGLLTLAKGKPIGKEGYYWLKIHGANCAGVDKVPFPERIKFIEENHENIMACAKSPLENTWWAEQDSPFCFLAFCFEYAGVQHHGLSYVCSLPLAFDGSCSGIQHFSAMLRDEVGGRAVNLLPSETVQDIYGIVAKKVNEILQADAINGTDNEVVTVTDENEGEISEKVKLGTKALAGQWLAYGVTRSVTKRSVMTLAYGSKEFGFRQQVLRHTIQPAIDSGKGLMFTQPNQAAGYMAKLIWESVSVTVVAAVEAMNWLKSAAKLLAAEVKDKKTGEILRKRCAVHWVTPDGFPVWQEYKKPIQTRLNLMFLGQFRLQPTINTNKDSEIDAHKQESGIAPNFVHSQDGSHLRKTVVWAHEKYGIESFALIHDSFGTIPADAANLFKAVRETMVDTYESCDVLADFYDQFADQLHESQLDKMPALPAKGNLNLRDILESDFAFA

SEQ ID NO: 699 - DNA, 2670 bp, synthetic construct
  misc_feature 1..2670: note = Variant of RNA polymerase
  source 1..2670: mol_type = other DNA
atgcaccatcaccatcaccatatgaacacgattaacatcgctaagaacgacttctctgacatcgaactggctgctatcccgttcaacactctggtcgaccattacggtgagggtttagctcgcgaacagttggcccttgagcatgagtcttacgagatgggtgaagcacgtttccgcaagatgtttgaacgtcaacttaaagctggtgaggttgcggataacgctgccgccaagcctctcatcactaccctactccctaagatgattgcacgcatcaacgactggtttgaggaagtgaaagctaagcgcggcaagcgcccgacagccttccagttcctgcaagaaatcaagccggaagccgtagcgtacatcaccattaagaccactctggcttgcctaaccagtgcggaccgtacaaccgttcaggctgtagcaagcgcaatcggtcgtgccattgaggacgaggctcgcttcggtcgtatccgtgaccttgaagctaagcacttcctgaaaaacgttgaggaacaactcaacaagcgcgtagggcacgtcccgaagaaagcatttatgcaagttgtcgaggctgacatgctctctaagggtctactcggtggcgaggcgtggtcttcgtggcataaggaagactctattcatgtaggagtacgctgcatcgagatgctcattgagtcaaccggaatggttagcttacaccgccaaaatgctggcgtagtaggtaaagactctgagactatcgaactcgcacctgaatacgctgaggctatcgcaacccgtgcaggtgcgctggctggcatctctccgatgttccaaccttgcgtagttcctcctaagccgtggactggcattactggtggtggctattgggctaacggtcgtcgtcctctggcgctggtgcgtactcacagtaagaaaggtctgatgcgctacgaagacgtttacatgcctgaggtgtacaaagcgattaacattgcgcaaaacaccgcctggtcgatcaacaagtgggtcctggcggtcgccaacgtaatcaccaagtggaagcattgtccggtcgaggacatccctgcgattgagcgtgaagaactcccgatgaaaccggaagacatcgacatgaatcctgaggctctcaccgcgtggaaacgtgctaaagctgctgtgtaccgcaaggacaaggctcgcaagtctcgccgtatcttgcttgagttcatgcttgagcaagccaataagtttgctaaccataaggccatctggttcccttacaacatggactggcgcggtcgtgtttacgctgtgtcaatgttcaacccgcaaggtaacgatatgaccaaaggactgcttacgctggcgaaaggtaaaccaatcggtaaggaaggttactactggctgaaaatccacggtgcaaactgtgcgggtgtcgataaggttccgttccctgagcgcatcaagttcattgaggaaaaccacgagaacatcatggcttgcgctaagtctccactggagaacacttggtgggctgagcaagatagtccgttctgcttccttgcgttctgctttgagtacgctggggtacagcaccacggcctgagctataactgctcccttccgctggcgtttgacgggtcttgctctggcatccagcacttctccgcgatgctccgagatgaggtaggtggtcgcgcggttaacttgcttcctagtgaaaccgttcaggacatctacgggattgttgctaagaaagtcaacgagattctacaagcagacgcaatcaatgggaccgataacgaagtagttaccgtgaccgatgagaacgaaggtgaaatctctgagaaagtcaagctgggcactaaggcactggctggtcaatggctggcttacggtgttactcgcagtgtgactaagcgttcagtcatgacgctggcttacgggtccaaagagttcggcttccgtcaacaagtgctgcgccacactattcagccagctatggattccggcaagggtctgatgttcactcagccgaatcaggctgctggatacatggctaagctgatttgggaatctgtgagcgtgacggtggtagctgcggttgaagcaatgaactggcttaagtctgctgctaagctgctggctgctgaggtcaaagataagaagactggagagattcttcgcaagcgttgcgctgtgcattgggtaactcctgatggtttccctgtgtggcaggaatacaagaagcctattcagacgcgcttgaacctgatgttcctcggtcagttccgcttacagcctaccattaacaccaacaaagatagcgagattgatgcacataaacaggagtctggtatcgctcctaactttgtacacagccaagacggtagccaccttcgtaagactgtagtgtgggcacacgagaagtacggaatcgaatcttttgcactgattcacgactccttcggtaccattccggctgacgctgcgaacctgttcaaagcagtgcgcgaaactatggttgacacatatgagtcttgtgatgtactggctgatttctacgaccagttcgctgaccagttgcacgagtctcaattggacaaaatgccagcacttccggctaaaggtaacttgaacctccgtgacatcttagagtcggacttcgcgttcgcg

SEQ ID NO: 700 - protein, 890 aa, synthetic construct
  REGION 1..890: note = Variant of RNA polymerase
MHHHHHHMNTINIAKNDFSDIELAAIPFNTLVDHYGEGLAREQLALEHESYEMGEARFRKMFERQLKAGEVADNAAAKPLITTLLPKMIARINDWFEEVKAKRGKRPTAFQFLQEIKPEAVAYITIKTTLACLTSADRTTVQAVASAIGRAIEDEARFGRIRDLEAKHFLKNVEEQLNKRVGHVPKKAFMQVVEADMLSKGLLGGEAWSSWHKEDSIHVGVRCIEMLIESTGMVSLHRQNAGVVGKDSETIELAPEYAEAIATRAGALAGISPMFQPCVVPPKPWTGITGGGYWANGRRPLALVRTHSKKGLMRYEDVYMPEVYKAINIAQNTAWSINKWVLAVANVITKWKHCPVEDIPAIEREELPMKPEDIDMNPEALTAWKRAKAAVYRKDKARKSRRILLEFMLEQANKFANHKAIWFPYNMDWRGRVYAVSMFNPQGNDMTKGLLTLAKGKPIGKEGYYWLKIHGANCAGVDKVPFPERIKFIEENHENIMACAKSPLENTWWAEQDSPFCFLAFCFEYAGVQHHGLSYNCSLPLAFDGSCSGIQHFSAMLRDEVGGRAVNLLPSETVQDIYGIVAKKVNEILQADAINGTDNEVVTVTDENEGEISEKVKLGTKALAGQWLAYGVTRSVTKRSVMTLAYGSKEFGFRQQVLRHTIQPAMDSGKGLMFTQPNQAAGYMAKLIWESVSVTVVAAVEAMNWLKSAAKLLAAEVKDKKTGEILRKRCAVHWVTPDGFPVWQEYKKPIQTRLNLMFLGQFRLQPTINTNKDSEIDAHKQESGIAPNFVHSQDGSHLRKTVVWAHEKYGIESFALIHDSFGTIPADAANLFKAVRETMVDTYESCDVLADFYDQFADQLHESQLDKMPALPAKGNLNLRDILESDFAFA

SEQ ID NO: 701 - DNA, 2670 bp, synthetic construct
  misc_feature 1..2670: note = Variant of RNA polymerase
  source 1..2670: mol_type = other DNA
atgcaccatcaccatcaccatatgaacacgattaacatcgctaagaacgacttctctgacatcgaactggctgctatcccgttcaacactctggtcgaccattacggtgagggtttagctcgcgaacagttggcccttgagcatgagtcttacgagatgggtgaagcacgtttccgcaagatgtttgagcgtcaacttaaagctggtgaggttgcggataacgctgccgccaagcctctcatcactaccctactccctaagatgattgcacgcatcaacgactggtttgaggaagtgaaagctaagcgcggcaagcgcccgacagccttccagttcctgcaagaaatcaagccggaagccgtagcgtacatcaccattaagaccactctggcttgcctaaccagtgcggaccgtacaaccgttcaggctgtagcaagcgcaatcggttatgccattgaggacgaggctcgcttcggtcgtatccgtgaccttgaagctaagcacttcctgaaaaacgttgaggaacaactcaacaagcgcgtagggcacgtctacaagaaagcatttatgcaagttgtcgaggctgacatgctctctaagggtctactcggtggcgaggcgtggtcttcgtggcataaggaagactctattcatgtaggagtacgctgcatcgagatgctcattgagtcaaccggaatggttagcttacaccgccaaaatgctggcgtagtaggtaaagactctgagactatcgaactcgcacctgaatacgctgaggctatcgcaacccgtgcaggtgcgctggctggcatctctccgatgttccaaccttgcgtagttcctcctaagccgtggactggcattactggtggtggctattgggctaacggtcgtcgtcctctggcgctggtgcgtactcacagtaagaaaggtctgatgcgctacgaagacgtttacatgcctgaggtgtacaaagcgattaacattgcgcaaaacaccgcctggtcgatcaacaagtgggtcctggcggtcgccaacgtaatcaccaagtggaagcattgtccggtcgaggacatccctgcgattgagcgtgaagaactcccgatgaaaccggaagacatcgacatgaatcctgaggctctcaccgcgtggaaacgtgctaaagctgctgtgtaccgcaaggacaaggctcgcaagtctcgccgtatcttgcttgagttcatgcttgagcaagccaataagtttgctaaccataaggccatctggttcccttacaacatggactggcgcggtcgtgtttacgctgtgtcaatgttcaacccgcaaggtaacgatatgaccaaaggactgcttacgctggcgaaaggtaaaccaatcggtaaggaaggttactactggctgaaaatccacggtgcaaactgtgcgggtgtcgataaggttccgttccctgagcgcatcaagttcattgaggaaaaccacgagaacatcatggcttgcgctaagtctccactggagaacacttggtgggctgagcaagatagtccgttctgcttccttgcgttctgctttgagtacgctggggtacagcaccacggcctgagctataactgctcccttccgctggcgtttgacgggtcttgctctggcatccagcacttctccgcgatgctccgagatgaggtaggtggtcgcgcggttaacttgcttcctagtgaaaccgttcaggacatctacgggattgttgctaagaaagtcaacgagattctacaagcagacgcaatcaatgggaccgataacgaagtagttaccgtgaccgatgagaacgaaggtgaaatctctgagaaagtcaagctgggcactaaggcactggctggtcaatggctggcttacggtgttactcgcagtgtgactaagcgttcagtcatgacgctggcttacgggtccaaagagttcggcttccgtcaacaagtgctgcgccacactattcagccagctattgattccggcaagggtctgatgttcactcagccgaatcaggctgctggatacatggctaagctgatttgggaatctgtgagcgtgacggtggtagctgcggttgaagcaatgaactggcttaagtctgctgctaagctgctggctgctgaggtcaaagataagaagactggagagattcttcgcaagcgttgcgctgtgcattgggtaactcctgatggtttccctgtgtggcaggaatacaagaagcctattcagacgcgcttgaacctgatgttcctcggtcagttccgcttacagcctaccattaacaccaacaaagatagcgagattgatgcacataaacaggagtctggtatcgctcctaactttgtacacagccaagacggtagccaccttcgtaagactgtagtgtgggcacacgagaagtacggaatcgaatcttttgcactgattcacgactccttcggtaccattccggctgacgctgcgaacctgttcaaagcagtgcgcgaaactatggttgacacatatgagtcttgtgatgtactggctgatttctacgaccagttcgctgaccagttgcacgagtctcaattggacaaaatgccagcacttccggctaaaggtaacttgaacctccgtgacatcttagagtcggacttcgcgttcgcg

SEQ ID NO: 702 - protein, 890 aa, synthetic construct
  REGION 1..890: note = Variant of RNA polymerase
MHHHHHHMNTINIAKNDFSDIELAAIPFNTLVDHYGEGLAREQLALEHESYEMGEARFRKMFERQLKAGEVADNAAAKPLITTLLPKMIARINDWFEEVKAKRGKRPTAFQFLQEIKPEAVAYITIKTTLACLTSADRTTVQAVASAIGYAIEDEARFGRIRDLEAKHFLKNVEEQLNKRVGHVYKKAFMQVVEADMLSKGLLGGEAWSSWHKEDSIHVGVRCIEMLIESTGMVSLHRQNAGVVGKDSETIELAPEYAEAIATRAGALAGISPMFQPCVVPPKPWTGITGGGYWANGRRPLALVRTHSKKGLMRYEDVYMPEVYKAINIAQNTAWSINKWVLAVANVITKWKHCPVEDIPAIEREELPMKPEDIDMNPEALTAWKRAKAAVYRKDKARKSRRILLEFMLEQANKFANHKAIWFPYNMDWRGRVYAVSMFNPQGNDMTKGLLTLAKGKPIGKEGYYWLKIHGANCAGVDKVPFPERIKFIEENHENIMACAKSPLENTWWAEQDSPFCFLAFCFEYAGVQHHGLSYNCSLPLAFDGSCSGIQHFSAMLRDEVGGRAVNLLPSETVQDIYGIVAKKVNEILQADAINGTDNEVVTVTDENEGEISEKVKLGTKALAGQWLAYGVTRSVTKRSVMTLAYGSKEFGFRQQVLRHTIQPAIDSGKGLMFTQPNQAAGYMAKLIWESVSVTVVAAVEAMNWLKSAAKLLAAEVKDKKTGEILRKRCAVHWVTPDGFPVWQEYKKPIQTRLNLMFLGQFRLQPTINTNKDSEIDAHKQESGIAPNFVHSQDGSHLRKTVVWAHEKYGIESFALIHDSFGTIPADAANLFKAVRETMVDTYESCDVLADFYDQFADQLHESQLDKMPALPAKGNLNLRDILESDFAFA

SEQ ID NO: 703 - DNA, 2670 bp, synthetic construct
  misc_feature 1..2670: note = Variant of RNA polymerase
  source 1..2670: mol_type = other DNA
atgcaccatcaccatcaccatatgaacacgattaacatcgctaagaacgacttctctgacatcgaactggctgctatcccgttcaacactctggtcgaccattacggtgagggtttagctcgcgaacagttggcccttgagcatgagtcttacgagatgggtgaagcacgtttccgcaagatgtttgagcgtcaacttaaagctggtgaggttgcggataacgctgccgccaagcctctcatcactaccctactccctaagatgattgcacgcatcaacgactggtttgaggaagtgaaagctaagcgcggcaagcgcccgacagccttccagttcctgcaagaaatcaagccggaagccgtagcgtacatcaccattaagaccactctggcttgcctaaccagtgcggaccgtacaaccgttcagaacgtagcaagcgcaatcggttatgccattgaggacgaggctcgcttcggtcgtatccgtgaccttgaagctaagcacttcctgaaaaacgtggaggaacaactcaacaagcgcgtagggcacgtctacaagaaagcatttatgcaagttgtcgaggctgacatgctctctaagggtctactcggtggcgaggcgtggtcttcgtggcataaggaagactctattcatgtaggagtacgctgcatcgagatgctcattgagtcaaccggaatggttagcttacaccgccaaaatgctggcgtagtaggtgtggactctgagactatcgaactcgcacctgaatacgctgaggctatcgcaacccgtgcaggtgcgctggctggcatctctccgatgttccaaccttgcgtagttcctcctaagccgtggactggcattactggtggtggctattgggctaacggtcgtcgtcctctggcgctggtgcgtactcacagtaagaaagggctgatgcgctacgaagacgtttacatgcctgaggtgtacaaagcgattaacattgcgcaaaacaccgcctggtcgatcaacaagtgggtcctggcggtcgccaacgtaatcaccaagtggaagcattgtccggtcgaggacatccctgcgattgagcgtgaagaactcccgatgaaaccggaagacatcgacatgaatcctgaggctctcaccgcgtggaaacgtgctaaagctgctgtgtaccgcaaggacaaggctcgcaagtctcgccgtatcttgcttgagttcatgcttgagcaagccaataagtttgctaaccataaggccatctggttcccttacaacatggactggcgcggtcgtgtttacgctgtgtcaatgttcaacccgcaaggtaacgatatgaccaaaggactgcttacgctggcgaaaggtaaaccaatcggtaaggaaggttactactggctgaaaatccacggtgcaaactgtgcgggtgtcgataaggttccgttccctgagcgcatcaagttcattgaggaaaaccacgagaacatcatggcttgcgctaagtctccactggagaacacttggtgggctgagcaagatagtccgttctgcttccttgcgttctgctttgagtacgctggggtacagcaccacggcctgagctataactgctcccttccgctggcgtttgacgggtcttgctctggcatccagcacttctccgcgatgctccgagatgaggtaggtggtcgcgcggttaacttgcttcctagtgaaaccgttcaggacatctacgggattgttgctaagaaagtcaacgagattctacaagcagacgcaatcaatgggaccgataacgaagtagttaccgtgaccgatgagaacgaaggtgaaatctctgagaaagtcaagctgggcactaaggcactggctggtcaatggctggcttacggtgttactcgcagtgtgactaagcgttcagtcatgacgctggcttacgggtccaaagagttcggcttccgtcaacaagtgctgcgccacactattcagccagctattgattccggcaagggtctgatgttcactcagccgaatcaggctgctggatacatggctaagctgatttgggaatctgtgagcgtgacggtggtagctgcggttgaagcaatgaactggcttaagtctgctgctaagctgctggctgctgaggtcaaagataaaaagactggagagattcttcgcaagcgttgcgctgtgcattgggtaactcctgatggtttccctgtgtggcaggaatacaagaagcctattcagacgcgcttgaacctgatgttcctcggtcagttccgcttacagcctaccattaacaccaacaaagatagcgagattgatgcacataaacaggtgtctggtatcgctcctaactttgtacacagccaagacggtagccaccttcgtaagactgtagtgtgggcacacgagaagtacggaatcgaatcttttgcactgattcacgactccttcggtaccattccggctgacgctgcgaacctgttcaaagcagtgcgcgaaactatggttgacacatatgagtcttgtgatgtactggctgatttctacgaccagttcgctgaccagttgcacgagtctcaattggacaaaatgccagcacttccggctaaaggtaacttgaacctccgtgacatcttagagtcggacttcgcgttcgcg

SEQ ID NO: 704 - protein, 890 aa, synthetic construct
  REGION 1..890: note = Variant of RNA polymerase
MHHHHHHMNTINIAKNDFSDIELAAIPFNTLVDHYGEGLAREQLALEHESYEMGEARFRKMFERQLKAGEVADNAAAKPLITTLLPKMIARINDWFEEVKAKRGKRPTAFQFLQEIKPEAVAYITIKTTLACLTSADRTTVQNVASAIGYAIEDEARFGRIRDLEAKHFLKNVEEQLNKRVGHVYKKAFMQVVEADMLSKGLLGGEAWSSWHKEDSIHVGVRCIEMLIESTGMVSLHRQNAGVVGVDSETIELAPEYAEAIATRAGALAGISPMFQPCVVPPKPWTGITGGGYWANGRRPLALVRTHSKKGLMRYEDVYMPEVYKAINIAQNTAWSINKWVLAVANVITKWKHCPVEDIPAIEREELPMKPEDIDMNPEALTAWKRAKAAVYRKDKARKSRRILLEFMLEQANKFANHKAIWFPYNMDWRGRVYAVSMFNPQGNDMTKGLLTLAKGKPIGKEGYYWLKIHGANCAGVDKVPFPERIKFIEENHENIMACAKSPLENTWWAEQDSPFCFLAFCFEYAGVQHHGLSYNCSLPLAFDGSCSGIQHFSAMLRDEVGGRAVNLLPSETVQDIYGIVAKKVNEILQADAINGTDNEVVTVTDENEGEISEKVKLGTKALAGQWLAYGVTRSVTKRSVMTLAYGSKEFGFRQQVLRHTIQPAIDSGKGLMFTQPNQAAGYMAKLIWESVSVTVVAAVEAMNWLKSAAKLLAAEVKDKKTGEILRKRCAVHWVTPDGFPVWQEYKKPIQTRLNLMFLGQFRLQPTINTNKDSEIDAHKQVSGIAPNFVHSQDGSHLRKTVVWAHEKYGIESFALIHDSFGTIPADAANLFKAVRETMVDTYESCDVLADFYDQFADQLHESQLDKMPALPAKGNLNLRDILESDFAFA

SEQ ID NO: 705 - DNA, 2670 bp, synthetic construct
  misc_feature 1..2670: note = Variant of RNA polymerase
  source 1..2670: mol_type = other DNA
atgcaccatcaccatcaccatatgaacacgattaacatcgctaagaacgatttctctgacatcgaactggctgctatcccgttcaacactctggtcgaccattacggtgagggtttagctcgcgaacagttggcccttgagcatgagtcttacgaaatgggtgaagagcgtttccgcaagatgtttgagcgtcaacttaaagctggtgaggttgcggataacgctgccgccaagcctctcatcactaccctactccctaagatgattgcacgcattaacgactggtttgaggaagtgaaagctaagcgcggcaagcgcccgacagccttccagttcctgcaagaaatcaagccggaagccgtagcgtacatcaccattaagaccactctggcttgcctaaccagtgcggaccgtacaaccgttcagaacgtagcaagcgcaatcggtcgggccattgaggacgaggctcgcttcggtcgtatccgtgaccttgaagctaagcacttcctgaaaaacgttgaggaacaactcaacaagcgcgtagggcacgtctacaagaaagcatttatgcaagttgttgaggctgacatgctctctaagggtctactcggtggcgaggcgtggtcttcgtggcataaggaagactctattcatgtaggagtacgctgcatcgagatgctcattgagtcaaccggaatggttagcttacaccgccaaaatgctggcgtagtaggtaaagactctgagactatcgaactcgcacctgaatacgctgaggctatcgcaacccgtgcaggtgcgctggctggcatctctccgatgttccaaccttgcgtagttcctcctaagccgtggactggcattactggtggtggctattgggctaacggtcgtcgtcctctggcgctggtgcgtactcacagtaagaaagggctgatgcgctacgaagacgtttacatgcctgaggtgtacaaagcgattaacattgcgcaaaacaccgcctggtcgatcaacaagtgggtcctggcggtcgccaacgtaatcaccaagtggaagcattgtccggtcgaggacatccctgcgattgagcgtgaagaactcccgatgaaaccggaagacatcgacatgaatcctgaggctctcaccgcgtggaaacgtgctaaagctgctgtgtaccgcaaggacaaggctcgcaagtctcgccgtatcttgcttgagttcatgcttgagcaagccaataagtttgctaaccataaggccatctggttcccttacaacatggactggcgcggtcgtgtttacgctgtgtcaatgttcaacccgcaaggtaacgatatgaccaaaggactgcttacgctggcgaaaggtaaaccaatcggtaaggaaggttactactggctgaaaatccacggtgcaaactgtgcgggtgtcgataaggttccgttccctgagcgcatcaagttcattgaggaaaaccacgagaacatcatggcttgcgctaagtctccactggagaacacttggtgggctgagcaagatagtccgttctgcttccttgcgttctgctttgagtacgctggggtacagcaccacggcctgagctataactgctcccttccgctggcgtttgacgggtcttgctctggcatccagcacttctccgcgatgctccgagatgaggtaggtggtcgcgcggttaacttgcttcctagtgaaaccgttcaggacatctacgggattgttgctaagaaagtcaacgagattctacaagcagacgcaatcaatgggaccgataacgaagtagttaccgtgaccgatgagaacgaaggtgaaatctctgagaaagtcaagctgggcactaaggcactggctggtcaatggctgcgttacggtgttactcgcagtgtgactaagcgttcagtcatgacgctggcttacgggtccaaagagttcggcttccgtcaacaagtgctgcgccacactattcagccagctattgattccggcaagggtctgatgttcactcagccgaatcaggctgctggatacatggctaagctgatttgggaatctgtgagcgtgacggtggtagctgcggttgaagcaatgaactggcttaagtctgctgctaagctgctggctgctgaggtcaaagataagaagactggagagattcttcgcaagcgttgcgctgtgcattgggtaactcctgatggtttccctgtgtggcaggaatacaagaagcctattcagacgcgcttgaacctgatgttcctcggtcagttccgcttacagcctaccattaacaccaacaaagatagcgagattgatgcacataaacaggagtctggtatcgctcctaactttgtacacagccaagacggtagccaccttcgtaagactgtagtgtgggcacacgagaagtacggaatcgaatcttttgcactgattcacgactccttcggtaccattccggctgacgctgcgaacctgttcaaagcagtgcgcgaaactatggttgacacatatgagtcttgtgatgtactggctgatttctacgaccagttcgctgaccagttgcacgagtctcaattggacaaaatgccagcacttccggctaaaggtaacttgaacctccgtgacatcttagagtcggacttcgcgttcgcg

SEQ ID NO: 706 - protein, 890 aa, synthetic construct
  REGION 1..890: note = Variant of RNA polymerase
MHHHHHHMNTINIAKNDFSDIELAAIPFNTLVDHYGEGLAREQLALEHESYEMGEERFRKMFERQLKAGEVADNAAAKPLITTLLPKMIARINDWFEEVKAKRGKRPTAFQFLQEIKPEAVAYITIKTTLACLTSADRTTVQNVASAIGRAIEDEARFGRIRDLEAKHFLKNVEEQLNKRVGHVYKKAFMQVVEADMLSKGLLGGEAWSSWHKEDSIHVGVRCIEMLIESTGMVSLHRQNAGVVGKDSETIELAPEYAEAIATRAGALAGISPMFQPCVVPPKPWTGITGGGYWANGRRPLALVRTHSKKGLMRYEDVYMPEVYKAINIAQNTAWSINKWVLAVANVITKWKHCPVEDIPAIEREELPMKPEDIDMNPEALTAWKRAKAAVYRKDKARKSRRILLEFMLEQANKFANHKAIWFPYNMDWRGRVYAVSMFNPQGNDMTKGLLTLAKGKPIGKEGYYWLKIHGANCAGVDKVPFPERIKFIEENHENIMACAKSPLENTWWAEQDSPFCFLAFCFEYAGVQHHGLSYNCSLPLAFDGSCSGIQHFSAMLRDEVGGRAVNLLPSETVQDIYGIVAKKVNEILQADAINGTDNEVVTVTDENEGEISEKVKLGTKALAGQWLRYGVTRSVTKRSVMTLAYGSKEFGFRQQVLRHTIQPAIDSGKGLMFTQPNQAAGYMAKLIWESVSVTVVAAVEAMNWLKSAAKLLAAEVKDKKTGEILRKRCAVHWVTPDGFPVWQEYKKPIQTRLNLMFLGQFRLQPTINTNKDSEIDAHKQESGIAPNFVHSQDGSHLRKTVVWAHEKYGIESFALIHDSFGTIPADAANLFKAVRETMVDTYESCDVLADFYDQFADQLHESQLDKMPALPAKGNLNLRDILESDFAFA

SEQ ID NO: 707 - DNA, 2670 bp, synthetic construct
  misc_feature 1..2670: note = Variant of RNA polymerase
  source 1..2670: mol_type = other DNA
atgcaccatcaccatcaccatatgaacacgattaacatcgctaagaacgatttctctgacatcgaactggctgctatcccgttcaacactctggtcgaccattacggtgagggtttagctcgcgaacagttggcccttgagcatgagtcttacgaaatgggtgaagagcgtttccgcaagatgtttgagcgtcaacttaaagctggtgaggttgcggataacgctgccgccaagcctctcatcactaccctactccctaagatgattgcacgcattaacgactggtttgaggaagtgaaagctaagcgcggcaagcgcccgacagccttccagttcctgcaagaaatcaagccggaagccgtagcgtacatcaccattaagaccactctggcttgcctaaccagtgcggaccgtacaaccgttcaggcagtagcaagcgcaatcggtcgggccattgaggacgaggctcgcttcggtcgtatccgtgaccttgaagctaagcacttcctgaaaaacgttgaggaacaactcaacaagcgcgtagggcacgtctacaagaaagcatttatgcaagttgttgaggctgacatgctctctaagggtctactcggtggcgaggcgtggtcttcgtggcataaggaagactctattcatgtaggagtacgctgcatcgagatgctcattgagtcaaccggaatggttagcttacaccgccaaaatgctggcgtagtaggtcgcgactctgagactatcgaactcgcacctgaatacgctgaggctatcgcaacccgtgcaggtgcgctggctggcatctctccgatgttccaaccttgcgtagttcctcctaagccgtggactggcattactggtggtggctattgggctaacggtcgtcgtcctctggcgctggtgcgtactcacagtaagaaaggtctgatgcgctacgaagacgtttacatgcctgaggtgtacaaagcgattaacattgcgcaaaacaccgcctggtcgatcaacaagtgggtcctggcggtcgccaacgtaatcaccaagtggaagcattgtccggtcgaggacatccctgcgattgagcgtgaagaactcccgatgaaaccggaagacatcgacatgaatcctgaggctctcaccgcgtggaaacgtgctaaagctgctgtgtaccgcaaggacaaggctcgcaagtctcgccgtatcttgcttgagttcatgcttgagcaagccaataagtttgctaaccataaggccatctggttcgcttacaacatggactggcgcggtcgtgtttacgctgtgtcaatgttcaacccgcaaggtaacgatatgaccaaaggactgcttacgctggcgaaaggtaaaccaatcggtaaggaaggttactactggctgaaaatccacggtgcaaactgtgcgggtgtcgataaggttccgttccctgagcgcatcaagttcattgaggaaaaccacgagaacatcatggcttgcgctaagtctccactggagaacacttggtgggctgagcaagatagtccgttctgcttccttgcgttctgctttgagtacgctggggtacagcaccacggcctgagctataactgctcccttccgctggcgtttgacgggtcttgctctggcatccagcacttctccgcgatgctccgagatgaggtaggtggtcgcgcggttaacttgcttcctagtgaaaccgttcaggacatctacgggattgttgctaagaaagtcaacgagattctacaagcagacgcaatcaatgggaccgataacgaagtagttaccgtgaccgatgagaacgaaggtgaaatctctgagaaagtcaagctgggcactaaggcactggctggtcaatggctgcgttacggtgttactcgcagtgtgactaagcgttcagtcatgacgctggcttacgggttcaaagagttcggcttccgtcaacaagtgctgcgccacactattcagccagctattgattccggcaagggtctgatgttcactcagccgaatcaggctgctggatacatggctaagctgatttgggaatctgtgagcgtgacggtggtagctgcggttgaagcaatgaactggcttaagtctgctgctaagctgctggctgctgaggtcaaagataagaagactggagagattcttcgcaagcgttgcgctgtgcattgggtaactcctgatggtttccctgtgtggcaggaatacaagaagcctattcagacgcgcttgaacctgatgttcctcggtcagttccgcttacagcctaccattaacaccaacaaagatagcgagattgatgcacataaacaggtgtctggtatcgctcctaactttgtacacagccaagacggtagccaccttcgtaagactgtagtgtgggcacacgagaagtacggaatcgaatcttttgcactgattcacgactccttcggtaccattccggctgacgctgcgaacctgttcaaagcagtgcgcgaaactatggttgacacatatgagtcttgtgatgtactggctgatttctacgaccagttcgctgaccagttgcacgagtctcaattggacaaaatgccagcacttccggctaaaggtaacttgaacctccgtgacatcttagagtcggacttcgcgttcgcg

SEQ ID NO: 708 - protein, 890 aa, synthetic construct
  REGION 1..890: note = Variant of RNA polymerase
MHHHHHHMNTINIAKNDFSDIELAAIPFNTLVDHYGEGLAREQLALEHESYEMGEERFRKMFERQLKAGEVADNAAAKPLITTLLPKMIARINDWFEEVKAKRGKRPTAFQFLQEIKPEAVAYITIKTTLACLTSADRTTVQAVASAIGRAIEDEARFGRIRDLEAKHFLKNVEEQLNKRVGHVYKKAFMQVVEADMLSKGLLGGEAWSSWHKEDSIHVGVRCIEMLIESTGMVSLHRQNAGVVGRDSETIELAPEYAEAIATRAGALAGISPMFQPCVVPPKPWTGITGGGYWANGRRPLALVRTHSKKGLMRYEDVYMPEVYKAINIAQNTAWSINKWVLAVANVITKWKHCPVEDIPAIEREELPMKPEDIDMNPEALTAWKRAKAAVYRKDKARKSRRILLEFMLEQANKFANHKAIWFAYNMDWRGRVYAVSMFNPQGNDMTKGLLTLAKGKPIGKEGYYWLKIHGANCAGVDKVPFPERIKFIEENHENIMACAKSPLENTWWAEQDSPFCFLAFCFEYAGVQHHGLSYNCSLPLAFDGSCSGIQHFSAMLRDEVGGRAVNLLPSETVQDIYGIVAKKVNEILQADAINGTDNEVVTVTDENEGEISEKVKLGTKALAGQWLRYGVTRSVTKRSVMTLAYGFKEFGFRQQVLRHTIQPAIDSGKGLMFTQPNQAAGYMAKLIWESVSVTVVAAVEAMNWLKSAAKLLAAEVKDKKTGEILRKRCAVHWVTPDGFPVWQEYKKPIQTRLNLMFLGQFRLQPTINTNKDSEIDAHKQVSGIAPNFVHSQDGSHLRKTVVWAHEKYGIESFALIHDSFGTIPADAANLFKAVRETMVDTYESCDVLADFYDQFADQLHESQLDKMPALPAKGNLNLRDILESDFAFA

SEQ ID NO: 709 - DNA, 2670 bp, synthetic construct
  misc_feature 1..2670: note = Variant of RNA polymerase
  source 1..2670: mol_type = other DNA
atgcaccatcaccatcaccatatgaacacgattaacatcgctaagaacgatttctctgacatcgaactggctgctatcccgttcaacactctggtcgaccattacggtgagggtttagctcgcgaacagttggcccttgagcatgagtcttacgaaatgggtgaagagcgtttccgcaagatgtttgagcgtcaacttaaagctggtgaggttgcggataacgctgccgccaagcctctcatcactaccctactccctaagatgattgcacgcattaacgactggtttgaggaagtgaaagctaagcgcggcaagcgcccgacagccttccagttcctgcaagaaatcaagccggaagccgtagcgtacatcaccattaagaccactctggcttgcctaaccagtgcggaccgtacaaccgttcaggcagtagcaagcgcaatcggtcgggccattgaggacgaggctcgcttcggtcgtatccgtgaccttgaagctaagcacttcctgaaaaacgttgaggaacaactcaacaagcgcgtagggcacgtctacaagaaagcatttatgcaagttgttgaggctgacatgctctctaagggtctactcggtggcgaggcgtggtcttcgtggcataaggaagactctattcatgtaggagtacgctgcatcgagatgctcattgagtcaaccggaatggttagcttacaccgccaaaatgctggcgtagtaggtcgcgactctgagactatcgaactcgcacctgaatacgctgaggctatcgcaacccgtgcaggtgcgctggctggcatctctccgatgttccaaccttgcgtagttcctcctaagccgtggactggcattactggtggtggctattgggctaacggtcgtcgtcctctggcgctggtgcgtactcacagtaagaaaggtctgatgcgctacgaagacgtttacatgcctgaggtgtacaaagcgattaacattgcgcaaaacaccgcctggtcgatcaacaagtgggtcctggcggtcgccaacgtaatcaccaagtggaagcattgtccggtcgaggacatccctgcgattgagcgtgaagaactcccgatgaaaccggaagacatcgacatgaatcctgaggctctcaccgcgtggaaacgtgctaaagctgctgtgtaccgcaaggacaaggctcgcaagtctcgccgtatcttgcttgagttcatgcttgagcaagccaataagtttgctaaccataaggccatctggttcccttacaacatggactggcgcggtcgtgtttacgctgtgtcaatgttcaacccgcaaggtaacgatatgaccaaaggactgcttacgctggcgaaaggtaaaccaatcggtaaggaaggttactactggctgaaaatccacggtgcaaactgtgcgggtgtcgataaggttccgttccctgagcgcatcaagttcattgaggaaaaccacgagaacatcatggcttgcgctaagtctccactggagaacacttggtgggctgagcaagatagtccgttctgcttccttgcgttctgctttgagtacgctggggtacagcaccacggcctgagctataactgctcccttccgctggcgtttgacgggtcttgctctggcatccagcacttctccgcgatgctccgagatgaggtaggtggtcgcgcggttaacttgcttcctagtgaaaccgttcaggacatctacgggattgttgctaagaaagtcaacgagattctacaagcagacgcaatcaatgggaccgataacgaagtagttaccgtgaccgatgagaacgaaggtgaaatctctgagaaagtcaagctgggcactaaggcactggctggtcaatggctgcgttacggtgttactcgcagtgtgactaagcgttcagtcatgacgctggcttacgggtccaaagagttcggcttccgtcaacaagtgctggaacacactattcagccagctattgattccggcaagggtctgatgttcactcagccgaatcaggctgctggatacatggctaagctgatttgggaatctgtgagcgtgacggtggtagctgcggttgaagcaatgaactggcttaagtctgctgctaagctgctggctgctgaggtcaaagataagaagactggagagattcttcgcaagcgttgcgctgtgcattgggtaactcctgatggtttccctgtgtggcaggaatacaagaagcctattcagacgcgcttgaacctgatgttcctcggtcagttccgcttacagcctaccattaacaccaacaaagatagcgagattgatgcacataaacaggtgtctggtatcgctcctaactttgtacacagccaagacggtagccaccttcgtaagactgtagtgtgggcacacgagaagtacggaatcgaatcttttgcactgattcacgactccttcggtaccattccggctgacgctgcgaacctgttcaaagcagtgcgcgaaactatggttgacacatatgagtcttgtgatgtactggctgatttctacgaccagttcgctgaccagttgcacgagtctcaattggacaaaatgccagcacttccggctaaaggtaacttgaacctccgtgacatcttagagtcggacttcgcgttcgcg

SEQ ID NO: 710 - protein, 890 aa, synthetic construct
  REGION 1..890: note = Variant of RNA polymerase
MHHHHHHMNTINIAKNDFSDIELAAIPFNTLVDHYGEGLAREQLALEHESYEMGEERFRKMFERQLKAGEVADNAAAKPLITTLLPKMIARINDWFEEVKAKRGKRPTAFQFLQEIKPEAVAYITIKTTLACLTSADRTTVQAVASAIGRAIEDEARFGRIRDLEAKHFLKNVEEQLNKRVGHVYKKAFMQVVEADMLSKGLLGGEAWSSWHKEDSIHVGVRCIEMLIESTGMVSLHRQNAGVVGRDSETIELAPEYAEAIATRAGALAGISPMFQPCVVPPKPWTGITGGGYWANGRRPLALVRTHSKKGLMRYEDVYMPEVYKAINIAQNTAWSINKWVLAVANVITKWKHCPVEDIPAIEREELPMKPEDIDMNPEALTAWKRAKAAVYRKDKARKSRRILLEFMLEQANKFANHKAIWFPYNMDWRGRVYAVSMFNPQGNDMTKGLLTLAKGKPIGKEGYYWLKIHGANCAGVDKVPFPERIKFIEENHENIMACAKSPLENTWWAEQDSPFCFLAFCFEYAGVQHHGLSYNCSLPLAFDGSCSGIQHFSAMLRDEVGGRAVNLLPSETVQDIYGIVAKKVNEILQADAINGTDNEVVTVTDENEGEISEKVKLGTKALAGQWLRYGVTRSVTKRSVMTLAYGSKEFGFRQQVLEHTIQPAIDSGKGLMFTQPNQAAGYMAKLIWESVSVTVVAAVEAMNWLKSAAKLLAAEVKDKKTGEILRKRCAVHWVTPDGFPVWQEYKKPIQTRLNLMFLGQFRLQPTINTNKDSEIDAHKQVSGIAPNFVHSQDGSHLRKTVVWAHEKYGIESFALIHDSFGTIPADAANLFKAVRETMVDTYESCDVLADFYDQFADQLHESQLDKMPALPAKGNLNLRDILESDFAFA

SEQ ID NO: 711 - DNA, 2670 bp, synthetic construct
  misc_feature 1..2670: note = Variant of RNA polymerase
  source 1..2670: mol_type = other DNA
atgcaccatcaccatcaccatatgaacacgattaacatcgctaagaacgacttctctgacatcgaactggctgctatcccgttcaacactctggtcgaccattacggtgagggtttagctcgcgaacagttggcccttgagcatgagtcttacgaaatgggtgaaactcgtttccgcaagatgtttgagcgtcaacttaaagctggtgaggttgcggataacgctgccgccaagcctctcatcactaccctactccctaagatgattgcacgcattaacgactggtttgaggaagtgaaagctaagcgcggcaagcgcccgacagccttccagttcctgcaagaaatcaagccggaagccgtagcgtacatcaccattaagaccactctggcttgcctaaccagtgcggaccgtacaaccgttcaggctgtagcaagcgcaatcggttatgccattgaggacgaggctcgcttcggtcgtatccgtgaccttgaagctaagcacttcctgaaaaacgttgaggaacaactcaacaagcgcgtagggcacgtctacaagaaagcatttatgcaagttgtcgaggctgacatgctctctaagggtctactcggtggcgaggcgtggtcttcgtggcataaggaagactctattcatgtaggagtacgctgcatcgagatgctcattgagtcaaccggaatggttagcttacaccgccaaaatgctggcgtagtaggtaaagactctgagactatcgaactcgcacctgaatacgctgaggctattgcaacccgtgcaggtgcgctggctggcatctctccgatgttccaaccttgcgtagttcctcctaagccgtggactggcattactggtggtggctattgggctaacggtcgtcgtcctctggcgctggtgcgtactcacagtaagaaaggtctgatgcgctacgaagacgtttacatgcctgaggtgtacaaagcgattaacattgcgcaaaacaccgcctggtcgatcaacaagtgggtcctggcggtcgccaacgtaatcaccaagtggaagcattgtccggtcgaggacatccctgcgattgagcgtgaagaactcccgatgaaaccggaagacatcgacatgaatcctgaggctctcaccgcgtggaaacgtgctaaagctgctgtgtaccgcaaggacaaggctcgcaagtctcgccgtatcttgcttgagttcatgcttgagcaagccaataagtttgctaaccataaggccatctggttcccttacaacatggactggcgcggtcgtgtttacgctgtgtcaatgttcaacccgcaaggtaacgatatgaccaaaggactgcttacgctggcgaaaggtaaaccaatcggtaaggaaggttactactggctgaaaatccacggtgcaaactgtgcgggtgtcgataaggttccgttccctgagcgcatcaagttcattgaggaaaaccacgagaacatcatggcttgcgctaagtctccactggagaacacttggtgggctgagcaagatagtccgttctgcttccttgcgttctgctttgagtacgctggggtacagcaccacggcctgagctataactgctcccttccgctggcgtttgacgggtcttgctctggcatccagcacttctccgcgatgctccgagatgaggtaggtggtcgcgcggttaacttgcttcctagtgaaaccgttcaggacatctacgggattgttgctaagaaagtcaacgagattctacaagcagacgcaatcaatgggaccgataacgaagtagttaccgtgaccgatgagaacgaaggtgaaatctctgagaaagtcaagctgggcactaaggcactggctggtcaatggctggcatacggtgttactcgcagtgtgactaagcgttcagtcatgacgctggcttacgggtccaaagagttcggcttccgtcaacaagtgctgcgctggactattcagccagctattgattccggcaagggtctgatgttcactcagccgaatcaggctgctggatacatggctaagctgatttgggaatctgtgagcgtgacggtggtagctgcggttgaagcaatgaactggcttaagtctgctgctaagctgctggctgctgaggtcaaagataagaagactggagagattcttcgcaagcgttgcgctgtgcattgggtaactcctgatggtttccctgtgtggcaggaatacaagaagcctattcagacgcgcttgaacctgatgttcctcggtcagttccgcttacagcctaccattaacaccaacaaagatagcgagattgatgcacataaacaggtgtctggtatcgctcctaactttgtacacagccaagacggtagccaccttcgtaagactgtagtgtgggcacacgagaagtacggaatcgaatcttttgcactgattcacgactccttcggtaccattccggctgacgctgcgaacctgttcaaagcagtgcgcgaaactatggttgacacatatgagtcttgtgatgtactggctgatttctacgaccagttcgctgaccagttgcacgagtctcaattggacaaaatgccagcacttccggctaaaggtaacttgaacctccgtgacatcttagagtcggacttcgcgttcgcg

SEQ ID NO: 712 - protein, 890 aa, synthetic construct
  REGION 1..890: note = Variant of RNA polymerase
MHHHHHHMNTINIAKNDFSDIELAAIPFNTLVDHYGEGLAREQLALEHESYEMGETRFRKMFERQLKAGEVADNAAAKPLITTLLPKMIARINDWFEEVKAKRGKRPTAFQFLQEIKPEAVAYITIKTTLACLTSADRTTVQAVASAIGYAIEDEARFGRIRDLEAKHFLKNVEEQLNKRVGHVYKKAFMQVVEADMLSKGLLGGEAWSSWHKEDSIHVGVRCIEMLIESTGMVSLHRQNAGVVGKDSETIELAPEYAEAIATRAGALAGISPMFQPCVVPPKPWTGITGGGYWANGRRPLALVRTHSKKGLMRYEDVYMPEVYKAINIAQNTAWSINKWVLAVANVITKWKHCPVEDIPAIEREELPMKPEDIDMNPEALTAWKRAKAAVYRKDKARKSRRILLEFMLEQANKFANHKAIWFPYNMDWRGRVYAVSMFNPQGNDMTKGLLTLAKGKPIGKEGYYWLKIHGANCAGVDKVPFPERIKFIEENHENIMACAKSPLENTWWAEQDSPFCFLAFCFEYAGVQHHGLSYNCSLPLAFDGSCSGIQHFSAMLRDEVGGRAVNLLPSETVQDIYGIVAKKVNEILQADAINGTDNEVVTVTDENEGEISEKVKLGTKALAGQWLAYGVTRSVTKRSVMTLAYGSKEFGFRQQVLRWTIQPAIDSGKGLMFTQPNQAAGYMAKLIWESVSVTVVAAVEAMNWLKSAAKLLAAEVKDKKTGEILRKRCAVHWVTPDGFPVWQEYKKPIQTRLNLMFLGQFRLQPTINTNKDSEIDAHKQVSGIAPNFVHSQDGSHLRKTVVWAHEKYGIESFALIHDSFGTIPADAANLFKAVRETMVDTYESCDVLADFYDQFADQLHESQLDKMPALPAKGNLNLRDILESDFAFA

SEQ ID NO: 713 - DNA, 2670 bp, synthetic construct
  misc_feature 1..2670: note = Variant of RNA polymerase
  source 1..2670: mol_type = other DNA
atgcaccatcaccatcaccatatgaacacgattaacatcgctaagaacgatttctctgacatcgaactggctgctatcccgttcaacactctggtcgaccattacggtgagggtttagctcgcgaacagttggcccttgagcatgagtcttacgaaatgggtgaagagcgtttccgcaagatgtttgagcgtcaacttaaagctggtgaggttgcggataacgctgccgccaagcctctcatcactaccctactccctaagatgattgcacgcattaacgactggtttgaggaagtgaaagctaagcgcggcaagcgcccgacagccttccagttcctgcaagaaatcaagccggaagccgtagcgtacatcaccattaagaccactctggcttgcctaaccagtgcggaccgtacaaccgttcaggcagtagcaagcgcaatcggtcgggccattgaggacgaggctcgcttcggtcgtatccgtgaccttgaagctaagcacttcctgaaaaacgttgaggaacaactcaacaagcgcgtagggcacgtctacaagaaagcatttatgcaagttgttgaggctgacatgctctctaagggtctactcggtggcgaggcgtggtcttcgtggcataaggaagactctattcatgtaggagtacgctgcatcgagatgctcattgagtcaaccggaatggttagcttacaccgccaaaatgctggcgtagtaggtaaggactctgagactatcgaactcgcacctgaatacgctgaggctatcgcaacccgtgcaggtgcgctggctggcatctctccgatgttccaaccttgcgtagttcctcctaagccgtggactggcattactggtggtggctattgggctaacggtcgtcgtcctctggcgctggtgcgtactcacagtaagaaagggctgatgcgctacgaagacgtttacatgcctgaggtgtacaaagcgattaacattgcgcaaaacaccgcctggtcgatcaacaagtgggtcctggcggtcgccaacgtaatcaccaagtggaagcattgtccggtcgaggacatccctgcgattgagcgtgaagaactcccgatgaaaccggaagacatcgacatgaatcctgaggctctcaccgcgtggaaacgtgctaaagctgctgtgtaccgcaaggacaaggctcgcaagtctcgccgtatcttgcttgagttcatgcttgagcaagccaataagtttgctaaccataaggccatctggttcccttacaacatggactggcgcggtcgtgtttacgctgtgtcaatgttcaacccgcaaggtaacgatatgaccaaaggactgcttacgctggcgaaaggtaaaccaatcggtaaggaaggttactactggctgaaaatccacggtgcaaactgtgcgggtgtcgataaggttccgttccctgagcgcatcaagttcattgaggaaaaccacgagaacatcatggcttgcgctaagtctccactggagaacacttggtgggctgagcaagatagtccgttctgcttccttgcgttctgctttgagtacgctggggtacagcaccacggcctgagctataactgctcccttccgctggcgtttgacgggtcttgctctggcatccagcacttctccgcgatgctccgagatgaggtaggtggtcgcgcggttaacttgcttcctagtgaaaccgttcaggacatctacgggattgttgctaagaaagtcaacgagattctacaagcagacgcaatcaatgggaccgataacgaagtagttaccgtgaccgatgagaacgaaggtgaaatctctgagaaagtcaagctgggcactaaggcactggctggtcaatggctgcgttacggtgttactcgcagtgtgactaagcgttcagtcatgacgctggcttacgggtccaaagagttcggcttccgtcaacaagtgctgcgccacactattcagccagctattgattccggcaagggtctgatgttcactcagccgaatcaggctgctggatacatggctaagctgatttgggaatctgtgagcgtgacggtggtagctgcggttgaagcaatgaactggcttaagtctgctgctaagctgctggctgctgaggtcaaagataaaacgactggagagattcttcgcaagcgttgcgctgtgcattgggtaactcctgatggtttccctgtgtggcaggaatacaagaagcctattcagacgcgcttgaacctgatgttcctcggtcagttccgcttacagcctaccattaacaccaacaaagatagcgagattgatgcacataaacaggtgtctggtatcgctcctaactttgtacacagccaagacggtagccaccttcgtaagactgtagtgtgggcacacgagaagtacggaatcgaatcttttgcactgattcacgactccttcggtaccattccggctgacgctgcgaacctgttcaaagcagtgcgcgaaactatggttgacacatatgagtcttgtgatgtactggctgatttctacgaccagttcgctgaccagttgcacgagtctcaattggacaaaatgccagcacttccggctaaaggtaacttgaacctccgtgacatcttagagtcggacttcgcgttcgcg

SEQ ID NO: 714 - protein, 890 aa, synthetic construct
  REGION 1..890: note = Variant of RNA polymerase
MHHHHHHMNTINIAKNDFSDIELAAIPFNTLVDHYGEGLAREQLALEHESYEMGEERFRKMFERQLKAGEVADNAAAKPLITTLLPKMIARINDWFEEVKAKRGKRPTAFQFLQEIKPEAVAYITIKTTLACLTSADRTTVQAVASAIGRAIEDEARFGRIRDLEAKHFLKNVEEQLNKRVGHVYKKAFMQVVEADMLSKGLLGGEAWSSWHKEDSIHVGVRCIEMLIESTGMVSLHRQNAGVVGKDSETIELAPEYAEAIATRAGALAGISPMFQPCVVPPKPWTGITGGGYWANGRRPLALVRTHSKKGLMRYEDVYMPEVYKAINIAQNTAWSINKWVLAVANVITKWKHCPVEDIPAIEREELPMKPEDIDMNPEALTAWKRAKAAVYRKDKARKSRRILLEFMLEQANKFANHKAIWFPYNMDWRGRVYAVSMFNPQGNDMTKGLLTLAKGKPIGKEGYYWLKIHGANCAGVDKVPFPERIKFIEENHENIMACAKSPLENTWWAEQDSPFCFLAFCFEYAGVQHHGLSYNCSLPLAFDGSCSGIQHFSAMLRDEVGGRAVNLLPSETVQDIYGIVAKKVNEILQADAINGTDNEVVTVTDENEGEISEKVKLGTKALAGQWLRYGVTRSVTKRSVMTLAYGSKEFGFRQQVLRHTIQPAIDSGKGLMFTQPNQAAGYMAKLIWESVSVTVVAAVEAMNWLKSAAKLLAAEVKDKTTGEILRKRCAVHWVTPDGFPVWQEYKKPIQTRLNLMFLGQFRLQPTINTNKDSEIDAHKQVSGIAPNFVHSQDGSHLRKTVVWAHEKYGIESFALIHDSFGTIPADAANLFKAVRETMVDTYESCDVLADFYDQFADQLHESQLDKMPALPAKGNLNLRDILESDFAFA

SEQ ID NO: 715 - DNA, 2670 bp, synthetic construct
  misc_feature 1..2670: note = Variant of RNA polymerase
  source 1..2670: mol_type = other DNA
atgcaccatcaccatcaccatatgaacacgattaacatcgctaagaacgatttctctgacatcgaactggctgctatcccgttcaacactctggtcgaccattacggtgagggtttagctcgcgaacagttggcccttgagcatgagtcttacgaaatgggtgaagagcgtttccgcaagatgtttgagcgtcaacttaaagctggtgaggttgcggataacgctgccgccaagcctctcatcactaccctactccctaagatgattgcacgcattaacgactggtttgaggaagtgaaagctaagcgcggcaagcgcccgacagccttccagttcctgcaagaaatcaagccggaagccgtagcgtacatcaccattaagaccactctggcttgcctaaccagtgcggaccgtacaaccgttcaggctgtagcaagcgcaatcggtcgggccattgaggacgaggctcgcttcggtcgtatccgtgaccttgaagctaagcacttcctgaaaaacgttgaggaacaactcaacaagcgcgtagggcacgtctacaagaaagcatttatgcaagttgttgaggctgacatgctctctaagggtctactcggtggcgaggcgtggtcttcgtggcataaggaagactctattcatgtaggagtacgctgcatcgagatgctcattgagtcaaccggaatggttagcttacaccgccaaaatgctggcgtagtaggtaaagactctgagactatcgaactcgcacctgaatacgctgaggctatcgcaacccgtgcaggtgcgctggctggcatctctccgatgttccaaccttgcgtagttcctcctaagccgtggactggcattactggtggtggctattgggctaacggtcgtcgtcctctggcgctggtgcgtactcacagtaagaaagggctgatgcgctacgaagacgtttacatgcctgaggtgtacaaagcgattaacattgcgcaaaacaccgcctggtcgatcaacaagtgggtcctggcggtcgccaacgtaatcaccaagtggaagcattgtccggtcgaggacatccctgcgattgagcgtgaagaactcccgatgaaaccggaagacatcgacatgaatcctgaggctctcaccgcgtggaaacgtgctaaagctgctgtgtaccgcaaggacaaggctcgcaagtctcgccgtatcttgcttgagttcatgcttgagcaagccaataagtttgctaaccataaggccatctggttcccttacaacatggactggcgcggtcgtgtttacgctgtgtcaatgttcaacccgcaaggtaacgatatgaccaaaggactgcttacgctggcgaaaggtaaaccaatcggtaaggaaggttactactggctgaaaatccacggtgcaaactgtgcgggtgtcgataaggttccgttccctgagcgcatcaagttcattgaggaaaaccacgagaacatcatggcttgcgctaagtctccactggagaacacttggtgggctgagcaagatagtccgttctgcttccttgcgttctgctttgagtacgctggggtacagcaccacggcctgagctataactgctcccttccgctggcgtttgacgggtcttgctctggcatccagcacttctccgcgatgctccgagatgaggtaggtggtcgcgcggttaacttgcttcctagtgaaaccgttcaggacatctacgggattgttgctaagaaagtcaacgagattctacaagcagacgcaatcaatgggaccgataacgaagtagttaccgtgaccgatgagaacgaaggtgaaatctctgagaaagtcaagctgggcactaaggcactggctggtcaatggctgcgttacggtgttactcgcagtgtgactaagcgttcagtcatgacgctggcttacgggtccaaagagttcggcttccgtcaacaagtgctgcgccacactattcagccagctattgattccggcaagggtctgatgttcactcagccgaatcaggctgctggatacatggctaagctgatttgggaatctgtgagcgtgacggtggtagctgcggttgaagcaatgaactggcttaagtctgctgctaagctgctggctgctgaggtcaaagataagaagactggagagattcttcgcaagcgttgcgctgtgcattgggtaactcctgatggtttccctgtgtggcaggaatacaagaagcctattcagacgcgcttgaacctgatgttcctcggtcagttccgcttacagcctaccattaacaccaacaaagatagcgagattgatgcacataaacaggtgtctggtatcgctcctaactttgtacacagccaagacggtagccaccttcgtaagactgtagtgtgggcacacgagaagtacggaatcgaatcttttgcactgattcacgactccttcggtaccattccggctgacgctgcgaacctgttcaaagcagtgcgcgaaactatggttgacacatatgagtcttgtgatgtactggctgatttctacgaccagttcgctgaccagttgcacgagtctcaattggacaaaatgccagcacttccggctaaaggtaacttgaacctccgtgacatcttagagtcggacttcgcgttcgcg

SEQ ID NO: 716 - protein, 890 aa, synthetic construct
  REGION 1..890: note = Variant of RNA polymerase
MHHHHHHMNTINIAKNDFSDIELAAIPFNTLVDHYGEGLAREQLALEHESYEMGEERFRKMFERQLKAGEVADNAAAKPLITTLLPKMIARINDWFEEVKAKRGKRPTAFQFLQEIKPEAVAYITIKTTLACLTSADRTTVQAVASAIGRAIEDEARFGRIRDLEAKHFLKNVEEQLNKRVGHVYKKAFMQVVEADMLSKGLLGGEAWSSWHKEDSIHVGVRCIEMLIESTGMVSLHRQNAGVVGKDSETIELAPEYAEAIATRAGALAGISPMFQPCVVPPKPWTGITGGGYWANGRRPLALVRTHSKKGLMRYEDVYMPEVYKAINIAQNTAWSINKWVLAVANVITKWKHCPVEDIPAIEREELPMKPEDIDMNPEALTAWKRAKAAVYRKDKARKSRRILLEFMLEQANKFANHKAIWFPYNMDWRGRVYAVSMFNPQGNDMTKGLLTLAKGKPIGKEGYYWLKIHGANCAGVDKVPFPERIKFIEENHENIMACAKSPLENTWWAEQDSPFCFLAFCFEYAGVQHHGLSYNCSLPLAFDGSCSGIQHFSAMLRDEVGGRAVNLLPSETVQDIYGIVAKKVNEILQADAINGTDNEVVTVTDENEGEISEKVKLGTKALAGQWLRYGVTRSVTKRSVMTLAYGSKEFGFRQQVLRHTIQPAIDSGKGLMFTQPNQAAGYMAKLIWESVSVTVVAAVEAMNWLKSAAKLLAAEVKDKKTGEILRKRCAVHWVTPDGFPVWQEYKKPIQTRLNLMFLGQFRLQPTINTNKDSEIDAHKQVSGIAPNFVHSQDGSHLRKTVVWAHEKYGIESFALIHDSFGTIPADAANLFKAVRETMVDTYESCDVLADFYDQFADQLHESQLDKMPALPAKGNLNLRDILESDFAFA

SEQ ID NO: 717 - DNA, 2670 bp, synthetic construct
  misc_feature 1..2670: note = Variant of RNA polymerase
  source 1..2670: mol_type = other DNA
atgcaccatcaccatcaccatatgaacacgattaacatcgctaagaacgatttctctgacatcgaactggctgctatcccgttcaacactctggtcgaccattacggtgagggtttagctcgcgaacagttggcccttgagcatgagtcttacgaaatgggtgaagagcgtttccgcaagatgtttgagcgtcaacttaaagctggtgaggttgcggataacgctgccgccaagcctctcatcactaccctactccctaagatgattgcacgcattaacgactggtttgaggaagtgaaagctaagcgcggcaagcgcccgacagccttccagttcctgcaagaaatcaagccggaagccgtagcgtacatcaccattaagaccactctggcttgcctaaccagtgcggaccgtacaaccgttcaggcagtagcaagcgcaatcggtcgggccattgaggacgaggctcgcttcggtcgtatccgtgaccttgaagctaagcacttcctgaaaaacgttgaggaacaactcaacaagcgcgtagggcacgtctacaagaaagcatttatgcaagttgttgaggctggcatgctctctaagggtctactcggtggcgaggcgtggtcttcgtggcataaggaagactctattcatgtaggagtacgctgcatcgagatgctcattgagtcaaccggaatggttagcttacaccgccaaaatgctggcgtagtaggtaaagactctgagactatcgaactcgcacctgaatacgctgaggctatcgcaacccgtgcaggtgcgctggctggcatctctccgatgttccaaccttgcgtagttcctcctaagccgtggactggcattactggtggtggctattgggctaacggtcgtcgtcctctggcgctggtgcgtactcacagtaagaaagggctgatgcgctacgaagacgtttacatgcctgaggtgtacaaagcgattaacattgcgcaaaacaccgcctggtcgatcaacaagtgggtcctggcggtcgccaacgtaatcaccaagtggaagcattgtccggtcgaggacatccctgcgattgagcgtgaagaactcccgatgaaaccggaagacatcgacatgaatcctgaggctctcaccgcgtggaaacgtgctaaagctgctgtgtaccgcaaggacaaggctcgcaagtctcgccgtatcttgcttgagttcatgcttgagcaagccaataagtttgctaaccataaggccatctggttcccttacaacatggactggcgcggtcgtgtttacgctgtgtcaatgttcaacccgcaaggtaacgatatgaccaaaggactgcttacgctggcgaaaggtaaaccaatcggtaaggaaggttactactggctgaaaatccacggtgcaaactgtgcgggtgtcgataaggttccgttccctgagcgcatcaagttcattgaggaaaaccacgagaacatcatggcttgcgctaagtctccactggagaacacttggtgggctgagcaagatagtccgttctgcttccttgcgttctgctttgagtacgctggggtacagcaccacggcctgagctataactgctcccttccgctggcgtttgacgggtcttgctctggcatccagcacttctccgcgatgctccgagatgaggtaggtggtcgcgcggttaacttgcttcctagtgaaaccgttcaggacatctacgggattgttgctaagaaagtcaacgagattctacaagcagacgcaatcaatgggaccgataacgaagtagttaccgtgaccgatgagaacgaaggtgaaatctctgagaaagtcaagctgggcactaaggcactggctggtcaatggctgcgttacggtgttactcgcagtgtgactaagcgttcagtcatgacgctggcttacgggtccaaagagttcggcttccgtcaacaagtgctggaacacactattcagccagctattgattccggcaagggtctgatgttcactcagccgaatcaggctgctggatacatggctaagctgatttgggaatctgtgagcgtgacggtggtagctgcggttgaagcaatgaactggcttaagtctgctgctaagctgctggctgctgaggtcaaagataaaaagactggagagattcttcgcaagcgttgcgctgtgcattgggtaactcctgatggtttccctgtgtggcaggaatacaagaagcctattcagacgcgcttgaacctgatgttcctcggtcagttccgcttacagcctaccattaacaccaacaaagatagcgagattgatgcacataaacaggtgtctggtatcgctcctaactttgtacacagccaagacggtagccaccttcgtaagactgtagtgtgggcacacgagaagtacggaatcgaatcttttgcactgattcacgactccttcggtaccattccggctgacgctgcgaacctgttcaaagcagtgcgcgaaactatggttgacacatatgagtcttgtgatgtactggctgatttctacgaccagttcgctgaccagttgcacgagtctcaattggacaaaatgccagcacttccggctaaaggtaacttgaacctccgtgacatcttagagtcggacttcgcgttcgcg

SEQ ID NO: 718 - protein, 890 aa, synthetic construct
  REGION 1..890: note = Variant of RNA polymerase
MHHHHHHMNTINIAKNDFSDIELAAIPFNTLVDHYGEGLAREQLALEHESYEMGEERFRKMFERQLKAGEVADNAAAKPLITTLLPKMIARINDWFEEVKAKRGKRPTAFQFLQEIKPEAVAYITIKTTLACLTSADRTTVQAVASAIGRAIEDEARFGRIRDLEAKHFLKNVEEQLNKRVGHVYKKAFMQVVEAGMLSKGLLGGEAWSSWHKEDSIHVGVRCIEMLIESTGMVSLHRQNAGVVGKDSETIELAPEYAEAIATRAGALAGISPMFQPCVVPPKPWTGITGGGYWANGRRPLALVRTHSKKGLMRYEDVYMPEVYKAINIAQNTAWSINKWVLAVANVITKWKHCPVEDIPAIEREELPMKPEDIDMNPEALTAWKRAKAAVYRKDKARKSRRILLEFMLEQANKFANHKAIWFPYNMDWRGRVYAVSMFNPQGNDMTKGLLTLAKGKPIGKEGYYWLKIHGANCAGVDKVPFPERIKFIEENHENIMACAKSPLENTWWAEQDSPFCFLAFCFEYAGVQHHGLSYNCSLPLAFDGSCSGIQHFSAMLRDEVGGRAVNLLPSETVQDIYGIVAKKVNEILQADAINGTDNEVVTVTDENEGEISEKVKLGTKALAGQWLRYGVTRSVTKRSVMTLAYGSKEFGFRQQVLEHTIQPAIDSGKGLMFTQPNQAAGYMAKLIWESVSVTVVAAVEAMNWLKSAAKLLAAEVKDKKTGEILRKRCAVHWVTPDGFPVWQEYKKPIQTRLNLMFLGQFRLQPTINTNKDSEIDAHKQVSGIAPNFVHSQDGSHLRKTVVWAHEKYGIESFALIHDSFGTIPADAANLFKAVRETMVDTYESCDVLADFYDQFADQLHESQLDKMPALPAKGNLNLRDILESDFAFA

SEQ ID NO: 719 - DNA, 2670 bp, synthetic construct
  misc_feature 1..2670: note = Variant of RNA polymerase
  source 1..2670: mol_type = other DNA
atgcaccatcaccatcaccatatgaacacgattaacatcgctaagaacgatttctctgacatcgaactggctgctatcccgttcaacactctggtcgaccattacggtgagggtttagctcgcgaacagttggcccttgagcatgagtcttacgaaatgggtgaagagcgtttccgcaagatgtttgagcgtcaacttaaagctggtgaggttgcggataacgctgccgccaagcctctcatcactaccctactccctaagatgattgcacgcattaacgactggtttgaggaagtgaaagctaagcgcggcaagcgcccgacagccttccagttcctgcaagaaatcaagccggaagccgtagcgtacatcaccattaagaccactctggcttgcctaaccagtgcggaccgtacaaccgttcaggcagtagcaagcgcaatcggtcgggccattgaggacgaggctcgcttcggtcgtatccgtgaccttgaagctaagcacttcctgaaaaacgttgaggaacaactcaacaagcgcgtagggcacgtctacaagaaagcatttatgcaagttgtcgaggctgatatgctctctaagggtctactcggtggcgaggcgtggtcttcgtggcataaggaagactctattcatgtaggagtacgctgcatcgagatgctcattgagtcaaccggaatggttagcttacaccgccaaaatgctggcgtagtaggtaaagactctgagactatcgaactcgcacctgaatacgctgaggctatcgcaacccgtgcaggtgcgctggctggcatctctccgatgttccaaccttgcgtagttcctcctaagccgtggactggcattactggtggtggctattgggctaacggtcgtcgtcctctggcgctggtgcgtactcacagtaagaaaggtctgatgcgctacgaagacgtttacatgcctgaggtgtacaaagcgattaacattgcgcaaaacaccgcctggtcgatcaacaagtgggtcctggcggtcgccaacgtaatcaccaagtggaagcattgtccggtcgaggacatccctgcgattgagcgtgaagaactcccgatgaaaccggaagacatcgacatgaatcctgaggctctcaccgcgtggaaacgtgctaaagctgctgtgtaccgcaaggacaaggctcgcaagtctcgccgtatcttgcttgagttcatgcttgagcaagccaataagtttgctaaccataaggccatctggttcccttacaacatggactggcgcggtcgtgtttacgctgtgtcaatgttcaacccgcaaggtaacgatatgaccaaaggactgcttacgctggcgaaaggtaaaccaatcggtaaggaaggttactactggctgaaaatccacggtgcaaactgtgcgggtgtcgataaggttccgttccctgagcgcatcaagttcattgaggaaaaccacgagaacatcatggcttgcgctaagtctccactggagaacacttggtgggctgagcaagatagtccgttctgcttccttgcgttctgctttgagtacgctggggtacagcaccacggcctgagctataactgctcccttccgctggcgtttgacgggtcttgctctggcatccagcacttctccgcgatgctccgagatgaggtaggtggtcgcgcggttaacttgcttcctagtgaaaccgttcaggacatctacgggattgttgctaagaaagtcaacgagattctacaagcagacgcaatcaatgggaccgataacgaagtagttaccgtgaccgatgagaacgaaggtgaaatctctgagaaagtcaagctgggcactaaggcactggctggtcaatggctgcgttacggtgttactcgcagtgtgactaagcgttcagtcatgacgctggcttacgggtccaaagagttcggcttccgtcaacaagtgctgcgccacactattcagccagctattgattccggcaagggtctgatgttcactcagccgaatcaggctgctggatacatggctaagctgatttgggaatctgtgagcgtgacggtggtagctgcggttgaagcaatgaactggcttaagtctgctgctaagctgctggctgctgaggtcaaagattcggcgactggagagattcttcgcaagcgttgcgctgtgcattgggtaactcctgatggtttccctgtgtggcaggaatacaagaagcctattcagacgcgcttgaacctgatgttcctcggtcagttccgcttacagcctaccattaacaccaacaaagatagcgagattgatgcacataaacaggtgtctggtatcgctcctaactttgtacacagccaagacggtagccaccttcgtaagactgtagtgtgggcacacgagaagtacggaatcgaatcttttgcactgattcacgactccttcggtaccattccggctgacgctgcgaacctgttcaaagcagtgcgcgaaactatggttgacacatatgagtcttgtgatgtactggctgatttctacgaccagttcgctgaccagttgcacgagtctcaattggacaaaatgccagcacttccggctaaaggtaacttgaacctccgtgacatcttagagtcggacttcgcgttcgcg

SEQ ID NO: 720 - protein, 890 aa, synthetic construct
  REGION 1..890: note = Variant of RNA polymerase
MHHHHHHMNTINIAKNDFSDIELAAIPFNTLVDHYGEGLAREQLALEHESYEMGEERFRKMFERQLKAGEVADNAAAKPLITTLLPKMIARINDWFEEVKAKRGKRPTAFQFLQEIKPEAVAYITIKTTLACLTSADRTTVQAVASAIGRAIEDEARFGRIRDLEAKHFLKNVEEQLNKRVGHVYKKAFMQVVEADMLSKGLLGGEAWSSWHKEDSIHVGVRCIEMLIESTGMVSLHRQNAGVVGKDSETIELAPEYAEAIATRAGALAGISPMFQPCVVPPKPWTGITGGGYWANGRRPLALVRTHSKKGLMRYEDVYMPEVYKAINIAQNTAWSINKWVLAVANVITKWKHCPVEDIPAIEREELPMKPEDIDMNPEALTAWKRAKAAVYRKDKARKSRRILLEFMLEQANKFANHKAIWFPYNMDWRGRVYAVSMFNPQGNDMTKGLLTLAKGKPIGKEGYYWLKIHGANCAGVDKVPFPERIKFIEENHENIMACAKSPLENTWWAEQDSPFCFLAFCFEYAGVQHHGLSYNCSLPLAFDGSCSGIQHFSAMLRDEVGGRAVNLLPSETVQDIYGIVAKKVNEILQADAINGTDNEVVTVTDENEGEISEKVKLGTKALAGQWLRYGVTRSVTKRSVMTLAYGSKEFGFRQQVLRHTIQPAIDSGKGLMFTQPNQAAGYMAKLIWESVSVTVVAAVEAMNWLKSAAKLLAAEVKDSATGEILRKRCAVHWVTPDGFPVWQEYKKPIQTRLNLMFLGQFRLQPTINTNKDSEIDAHKQVSGIAPNFVHSQDGSHLRKTVVWAHEKYGIESFALIHDSFGTIPADAANLFKAVRETMVDTYESCDVLADFYDQFADQLHESQLDKMPALPAKGNLNLRDILESDFAFA

SEQ ID NO: 721 - DNA, 2670 bp, synthetic construct
  misc_feature 1..2670: note = Variant of RNA polymerase
  source 1..2670: mol_type = other DNA
atgcaccatcaccatcaccatatgaacacgattaacatcgctaagaacgacttctctgacatcgaactggctgctatcccgttcaacactctggtcgaccattacggtgagggtttagctcgcgaacagttggcccttgagcatgagtcttacgaaatgggtgaaactcgtttccgcaagatgtttgagcgtcaacttaaagctggtgaggttgcggataacgctgccgccaagcctctcatcactaccctactccctaagatgattgcacgcattaacgactggtttgaggaagtgaaagctaagcgcggcaagcgcccgacagccttccagttcctgcaagaaatcaagccggaagccgtagcgtacatcaccattaagaccactctggcttgcctaaccagtgcggaccgtacaaccgttcagaacgtagcaagcgcaatcggttatgccattgaggacgaggctcgcttcggtcgtatccgtgaccttgaagctaagcacttcctgaaaaacgttgaggaacaactcaacaagcgcgtagggcacgtctacaagaaagcatttatgcaagttgtcgaggctgacatgctctctaagggtctactcggtggcgaggcgtggtcttcgtggcataaggaagactctattcatgtaggagtacgctgcatcgagatgctcattgagtcaaccggaatggttagcttacaccgccaaaatgctggcgtagtaggtaaggactctgagactatcgaactcgcacctgaatacgctgaggctattgcaacccgtgcaggtgcgctggctggcatctctccgatgttccaaccttgcgtagttcctcctaagccgtggactggcattactggtggtggctattgggctaacggtcgtcgtcctctggcgctggtgcgtactcacagtaagaaagggctgatgcgctacgaagacgtttacatgcctgaggtgtacaaagcgattaacattgcgcaaaacaccgcctggtcgatcaacaagtgggtcctggcggtcgccaacgtaatcaccaagtggaagcattgtccggtcgaggacatccctgcgattgagcgtgaagaactcccgatgaaaccggaagacatcgacatgaatcctgaggctctcaccgcgtggaaacgtgctaaagctgctgtgtaccgcaaggacaaggctcgcaagtctcgccgtatcttgcttgagttcatgcttgagcaagccaataagtttgctaaccataaggccatctggttcccttacaacatggactggcgcggtcgtgtttacgctgtgtcaatgttcaacccgcaaggtaacgatatgaccaaaggactgcttacgctggcgaaaggtaaaccaatcggtaaggaaggttactactggctgaaaatccacggtgcaaactgtgcgggtgtcgataaggttccgttccctgagcgcatcaagttcattgaggaaaaccacgagaacatcatggcttgcgctaagtctccactggagaacacttggtgggctgagcaagatagtccgttctgcttccttgcgttctgctttgagtacgctggggtacagcaccacggcctgagctataactgctcccttccgctggcgtttgacgggtcttgctctggcatccagcacttctccgcgatgctccgagatgaggtaggtggtcgcgcggttaacttgcttcctagtgaaaccgttcaggacatctacgggattgttgctaagaaagtcaacgagattctacaagcagacgcaatcaatgggaccgataacgaagtagttaccgtgaccgatgagaacgaaggtgaaatctctgagaaagtcaagctgggcactaaggcactggctggtcaatggctggcatacggtgttactcgcagtgtgactaagcgttcagtcatgacgctggcttacgggtccaaagagttcggcttccgtcaacaagtgctggaacacactattcagccagctattgattccggcaagggtctgatgttcactcagccgaatcaggctgctggatacatggctaagctgatttgggaatctgtgagcgtgacggtggtagctgcggttgaagcaatgaactggcttaagtctgctgctaagctgctggctgctgaggtcaaagataaaaagactggagagattcttcgcaagcgttgcgctgtgcattgggtaactcctgatggtttccctgtgtggcaggaatacaagaagcctattcagacgcgcttgaacctgatgttcctcggtcagttccgcttacagcctaccattaacaccaacaaagatagcgagattgatgcacataaacaggtgtctggtatcgctcctaactttgtacacagccaagacggtagccaccttcgtaagactgtagtgtgggcacacgagaagtacggaatcgaatcttttgcactgattcacgactccttcggtaccattccggctgacgctgcgaacctgttcaaagcagtgcgcgaaactatggttgacacatatgagtcttgtgatgtactggctgatttctacgaccagttcgctgaccagttgcacgagtctcaattggacaaaatgccagcacttccggctaaaggtaacttgaacctccgtgacatcttagagtcggacttcgcgttcgcg

SEQ ID NO: 722 - protein, 890 aa, synthetic construct
  REGION 1..890: note = Variant of RNA polymerase
MHHHHHHMNTINIAKNDFSDIELAAIPFNTLVDHYGEGLAREQLALEHESYEMGETRFRKMFERQLKAGEVADNAAAKPLITTLLPKMIARINDWFEEVKAKRGKRPTAFQFLQEIKPEAVAYITIKTTLACLTSADRTTVQNVASAIGYAIEDEARFGRIRDLEAKHFLKNVEEQLNKRVGHVYKKAFMQVVEADMLSKGLLGGEAWSSWHKEDSIHVGVRCIEMLIESTGMVSLHRQNAGVVGKDSETIELAPEYAEAIATRAGALAGISPMFQPCVVPPKPWTGITGGGYWANGRRPLALVRTHSKKGLMRYEDVYMPEVYKAINIAQNTAWSINKWVLAVANVITKWKHCPVEDIPAIEREELPMKPEDIDMNPEALTAWKRAKAAVYRKDKARKSRRILLEFMLEQANKFANHKAIWFPYNMDWRGRVYAVSMFNPQGNDMTKGLLTLAKGKPIGKEGYYWLKIHGANCAGVDKVPFPERIKFIEENHENIMACAKSPLENTWWAEQDSPFCFLAFCFEYAGVQHHGLSYNCSLPLAFDGSCSGIQHFSAMLRDEVGGRAVNLLPSETVQDIYGIVAKKVNEILQADAINGTDNEVVTVTDENEGEISEKVKLGTKALAGQWLAYGVTRSVTKRSVMTLAYGSKEFGFRQQVLEHTIQPAIDSGKGLMFTQPNQAAGYMAKLIWESVSVTVVAAVEAMNWLKSAAKLLAAEVKDKKTGEILRKRCAVHWVTPDGFPVWQEYKKPIQTRLNLMFLGQFRLQPTINTNKDSEIDAHKQVSGIAPNFVHSQDGSHLRKTVVWAHEKYGIESFALIHDSFGTIPADAANLFKAVRETMVDTYESCDVLADFYDQFADQLHESQLDKMPALPAKGNLNLRDILESDFAFA

SEQ ID NO: 723 - DNA, 2670 bp, synthetic construct
  misc_feature 1..2670: note = Variant of RNA polymerase
  source 1..2670: mol_type = other DNA
atgcaccatcaccatcaccatatgaacacgattaacatcgctaagaacgacttctctgacatcgaactggctgctatcccgttcaacactctggtcgaccattacggtgagggtttagctcgcgaacagttggcccttgagcatgagtcttacgaaatgggtgaaactcgtttccgcaagatgtttgagcgtcaacttaaagctggtgaggttgcggataacgctgccgccaagcctctcatcactaccctactccctaagatgattgcacgcattaacgactggtttgaggaagtgaaagctaagcgcggcaagcgcccgacagccttccagttcctgcaagaaatcaagccggaagccgtagcgtacatcaccattaagaccactctggcttgcctaaccagtgcggaccgtacaaccgttcaggcagtagcaagcgcaatcggttatgccattgaggacgaggctcgcttcggtcgtatccgtgaccttgaaacgaagcatttcctggaaaatgtggaggaacaactcaacaagcgcgtagggcacgtctacaagaaagcatttatgcaagttgtcgaggctgacatgctctctaagggtctactcggtggcgaggcgtggtcttcgtggcataaggaagactctattcatgtaggagtacgctgcatcgagatgctcattgagtcaaccggaatggttagcttacaccgccaaaatgctggcgtagtaggtcgcgactctgagactatcgaactcgcacctgaatacgctgaggctattgcaacccgtgcaggtgcgctggctggcatctctccgatgttccaaccttgcgtagttcctcctaagccgtggactggcattactggtggtggctattgggctaacggtcgtcgtcctctggcgctggtgcgtactcacagtaagaaagcgctgatgcgctacgaagacgtttacatgcctgaggtgtacaaagcgattaacattgcgcaaaacaccgcctggtcgatcaacaagtgggtcctggcggtcgccaacgtaatcaccaagtggaagcattgtccggtcgaggacatccctgcgattgagcgtgaagaactcccgatgaaaccggaagacatcgacatgaatcctgaggctctcaccgcgtggaaacgtgctaaagctgctgtgtaccgcaaggacaaggctcgcaagtctcgccgtatcttgcttgagttcatgcttgagcaagccaataagtttgctaaccataaggccatctggttcccttacaacatggactggcgcggtcgtgtttacgctgtgtcaatgttcaacccgcaaggtaacgatatgaccaaaggactgcttacgctggcgaaaggtaaaccaatcggtaaggaaggttactactggctgaaaatccacggtgcaaactgtgcgggtgtcgataaggttccgttccctgagcgcatcaagttcattgaggaaaaccacgagaacatcatggcttgcgctaagtctccactggagaacacttggtgggctgagcaagatagtccgttctgcttccttgcgttctgctttgagtacgctggggtacagcaccacggcctgagctataactgctcccttccgctggcgtttgacgggtcttgctctggcatccagcacttctccgcgatgctccgagatgaggtaggtggtcgcgcggttaacttgcttcctagtgaaaccgttcaggacatctacgggattgttgctaagaaagtcaacgagattctacaagcagacgcaatcaatgggaccgataacgaagtagttaccgtgaccgatgagaacgaaggtgaaatctctgagaaagtcaagctgggcactaaggcactggctggtcaatggctggcatacggtgttactcgcagtgtgactaagcgttcagtcatgacgctggcttacgggtccaaagagttcggcttccgtcaacaagtgctgcgccacactattcagccagctattgattccggcaagggtctgatgttcactcagccgaatcaggctgctggatacatggctaagctgatttgggaatctgtgagcgtgacggtggtagctgcggttgaagcaatgaactggcttaagtctgctgctaagctgctggctgctgaggtcaaagataagaagactggagagattcttcgcaagcgttgcgctgtgcattgggtaactcctgatggtttccctgtgtggcaggaatacaagaagcctattcagacgcgcttgaacctgatgttcctcggtcagttccgcttacagcctaccattaacaccaacaaagatagcgagattgatgcacataaacaggagtctggtatcgctcctaactttgtacacagccaagacggtagccaccttcgtaagactgtagtgtgggcacacgagaagtacggaatcgaatcttttgcactgattcacgactccttcggtaccattccggctgacgctgcgaacctgttcaaagcagtgcgcgaaactatggttgacacatatgagtcttgtgatgtactggctgatttctacgaccagttcgctgaccagttgcacgagtctcaattggacaaaatgccagcacttccggctaaaggtaacttgaacctccgtgacatcttagagtcggacttcgcgttcgcg

SEQ ID NO: 724 - protein, 890 aa, synthetic construct
  REGION 1..890: note = Variant of RNA polymerase
MHHHHHHMNTINIAKNDFSDIELAAIPFNTLVDHYGEGLAREQLALEHESYEMGETRFRKMFERQLKAGEVADNAAAKPLITTLLPKMIARINDWFEEVKAKRGKRPTAFQFLQEIKPEAVAYITIKTTLACLTSADRTTVQAVASAIGYAIEDEARFGRIRDLETKHFLENVEEQLNKRVGHVYKKAFMQVVEADMLSKGLLGGEAWSSWHKEDSIHVGVRCIEMLIESTGMVSLHRQNAGVVGRDSETIELAPEYAEAIATRAGALAGISPMFQPCVVPPKPWTGITGGGYWANGRRPLALVRTHSKKALMRYEDVYMPEVYKAINIAQNTAWSINKWVLAVANVITKWKHCPVEDIPAIEREELPMKPEDIDMNPEALTAWKRAKAAVYRKDKARKSRRILLEFMLEQANKFANHKAIWFPYNMDWRGRVYAVSMFNPQGNDMTKGLLTLAKGKPIGKEGYYWLKIHGANCAGVDKVPFPERIKFIEENHENIMACAKSPLENTWWAEQDSPFCFLAFCFEYAGVQHHGLSYNCSLPLAFDGSCSGIQHFSAMLRDEVGGRAVNLLPSETVQDIYGIVAKKVNEILQADAINGTDNEVVTVTDENEGEISEKVKLGTKALAGQWLAYGVTRSVTKRSVMTLAYGSKEFGFRQQVLRHTIQPAIDSGKGLMFTQPNQAAGYMAKLIWESVSVTVVAAVEAMNWLKSAAKLLAAEVKDKKTGEILRKRCAVHWVTPDGFPVWQEYKKPIQTRLNLMFLGQFRLQPTINTNKDSEIDAHKQESGIAPNFVHSQDGSHLRKTVVWAHEKYGIESFALIHDSFGTIPADAANLFKAVRETMVDTYESCDVLADFYDQFADQLHESQLDKMPALPAKGNLNLRDILESDFAFA

SEQ ID NO: 725 - DNA, 2670 bp, synthetic construct
  misc_feature 1..2670: note = Variant of RNA polymerase
  source 1..2670: mol_type = other DNA
atgcaccatcaccatcaccatatgaacacgattaacatcgctaagaacgacttctctgacatcgaactggctgctatcccgttcaacactctggtcgaccattacggtgagggtttagctcgcgaacagttggcccttgagcatgagtcttacgaaatgggtgaaactcgtttccgcaagatgtttgagcgtcaacttaaagctggtgaggttgcggataacgctgccgccaagcctctcatcactaccctactccctaagatgattgcacgcattaacgactggtttgaggaagtgaaagctaagcgcggcaagcgcccgacagccttccagttcctgcaagaaatcaagccggaagccgtagcgtacatcaccattaagaccactctggcttgcctaaccagtgcggaccgtacaaccgttcagaacgtagcaagcgcaatcggttatgccattgaggacgaggctcgcttcggtcgtatccgtgaccttgaagctaagcacttcctgaaaaacgttgaggaacaactcaacaagcgcgtagggcacgtctacaagaaagcatttatgcaagttgtcgaggctgacatgctctctaagggtctactcggtggcgaggcgtggtcttcgtggcataaggaagactctattcatgtaggagtacgctgcatcgagatgctcattgagtcaaccggaatggttagcttacaccgccaaaatgctggcgtagtaggtaaggactctgagactatcgaactcgcacctgaatacgctgaggctattgcaacccgtgcaggtgcgctggctggcatctctccgatgttccaaccttgcgtagttcctcctaagccgtggactggcattactggtggtggctattgggctaacggtcgtcgtcctctggcgctggtgcgtactcacagtaagaaagggctgatgcgctacgaagacgtttacatgcctgaggtgtacaaagcgattaacattgcgcaaaacaccgcctggtcgatcaacaagtgggtcctggcggtcgccaacgtaatcaccaagtggaagcattgtccggtcgaggacatccctgcgattgagcgtgaagaactcccgatgaaaccggaagacatcgacatgaatcctgaggctctcaccgcgtggaaacgtgctaaagctgctgtgtaccgcaaggacaaggctcgcaagtctcgccgtatcttgcttgagttcatgcttgagcaagccaataagtttgctaaccataaggccatctggttcccttacaacatggactggcgcggtcgtgtttacgctgtgtcaatgttcaacccgcaaggtaacgatatgaccaaaggactgcttacgctggcgaaaggtaaaccaatcggtaaggaaggttactactggctgaaaatccacggtgcaaactgtgcgggtgtcgataaggttccgttccctgagcgcatcaagttcattgaggaaaaccacgagaacatcatggcttgcgctaagtctccactggagaacacttggtgggctgagcaagatagtccgttctgcttccttgcgttctgctttgagtacgctggggtacagcaccacggcctgagctataactgctcccttccgctggcgtttgacgggtcttgctctggcatccagcacttctccgcgatgctccgagatgaggtaggtggtcgcgcggttaacttgcttcctagtgaaaccgttcaggacatctacgggattgttgctaagaaagtcaacgagattctacaagcagacgcaatcaatgggaccgataacgaagtagttaccgtgaccgatgagaacgaaggtgaaatctctgagaaagtcaagctgggcactaaggcactggctggtcaatggctggcatacggtgttactcgcagtgtgactaagcgttcagtcatgacgctggcttacgggtccaaagagttcggcttccgtcaacaagtgctgcgccacactattcagccagctattgattccggcaagggtctgatgttcactcagccgaatcaggctgctggatacatggctaagctgatttgggaatctgtgagcgtgacggtggtagctgcggttgaagcaatgaactggcttaagtctgctgctaagctgctggctgctgaggtcaaagataaaacgactggagagattcttcgcaagcgttgcgctgtgcattgggtaactcctgatggtttccctgtgtggcaggaatacaagaagcctattcagacgcgcttgaacctgatgttcctcggtcagttccgcttacagcctaccattaacaccaacaaagatagcgagattgatgcacataaacaggagtctggtatcgctcctaactttgtacacagccaagacggtagccaccttcgtaagactgtagtgtgggcacacgagaagtacggaatcgaatcttttgcactgattcacgactccttcggtaccattccggctgacgctgcgaacctgttcaaagcagtgcgcgaaactatggttgacacatatgagtcttgtgatgtactggctgatttctacgaccagttcgctgaccagttgcacgagtctcaattggacaaaatgccagcacttccggctaaaggtaacttgaacctccgtgacatcttagagtcggacttcgcgttcgcg

SEQ ID NO: 726 - protein, 890 aa, synthetic construct
  REGION 1..890: note = Variant of RNA polymerase
MHHHHHHMNTINIAKNDFSDIELAAIPFNTLVDHYGEGLAREQLALEHESYEMGETRFRKMFERQLKAGEVADNAAAKPLITTLLPKMIARINDWFEEVKAKRGKRPTAFQFLQEIKPEAVAYITIKTTLACLTSADRTTVQNVASAIGYAIEDEARFGRIRDLEAKHFLKNVEEQLNKRVGHVYKKAFMQVVEADMLSKGLLGGEAWSSWHKEDSIHVGVRCIEMLIESTGMVSLHRQNAGVVGKDSETIELAPEYAEAIATRAGALAGISPMFQPCVVPPKPWTGITGGGYWANGRRPLALVRTHSKKGLMRYEDVYMPEVYKAINIAQNTAWSINKWVLAVANVITKWKHCPVEDIPAIEREELPMKPEDIDMNPEALTAWKRAKAAVYRKDKARKSRRILLEFMLEQANKFANHKAIWFPYNMDWRGRVYAVSMFNPQGNDMTKGLLTLAKGKPIGKEGYYWLKIHGANCAGVDKVPFPERIKFIEENHENIMACAKSPLENTWWAEQDSPFCFLAFCFEYAGVQHHGLSYNCSLPLAFDGSCSGIQHFSAMLRDEVGGRAVNLLPSETVQDIYGIVAKKVNEILQADAINGTDNEVVTVTDENEGEISEKVKLGTKALAGQWLAYGVTRSVTKRSVMTLAYGSKEFGFRQQVLRHTIQPAIDSGKGLMFTQPNQAAGYMAKLIWESVSVTVVAAVEAMNWLKSAAKLLAAEVKDKTTGEILRKRCAVHWVTPDGFPVWQEYKKPIQTRLNLMFLGQFRLQPTINTNKDSEIDAHKQESGIAPNFVHSQDGSHLRKTVVWAHEKYGIESFALIHDSFGTIPADAANLFKAVRETMVDTYESCDVLADFYDQFADQLHESQLDKMPALPAKGNLNLRDILESDFAFA

SEQ ID NO: 727 - DNA, 2670 bp, synthetic construct
  misc_feature 1..2670: note = Variant of RNA polymerase
  source 1..2670: mol_type = other DNA
atgcaccatcaccatcaccatatgaacacgattaacatcgctaagaacgacttctctgacatcgaactggctgctatcccgttcaacactctggtcgaccattacggtgagggtttagctcgcgaacagttggcccttgagcatgagtcttacgaaatgggtgaaactcgtttccgcaagatgtttgagcgtcaacttaaagctggtgaggttgcggataacgctgccgccaagcctctcatcactaccctactccctaagatgattgcacgcattaacgactggtttgaggaagtgaaagctaagcgcggcaagcgcccgacagccttccagttcctgcaagaaatcaagccggaagccgtagcgtacatcaccattaagaccactctggcttgcctaaccagtgcggaccgtacaaccgttcaggctgtagcaagcgcaatcggttatgccattgaggacgaggctcgcttcggtcgtatccgtgaccttgaagctaagcacttcctgaaaaacgttgaggaacaactcaacaagcgcgtagggcacgtctacaagaaagcatttatgcaagttgtcgaggctgacatgctctctaagggtctactcggtggcgaggcgtggtcttcgtggcataaggaagactctattcatgtaggagtacgctgcatcgagatgctcattgagtcaaccggaatggttagcttacaccgccaaaatgctggcgtagtaggtaaagactctgagactatcgaactcgcacctgaatacgctgaggctattgcaacccgtgcaggtgcgctggctggcatctctccgatgttccaaccttgcgtagttcctcctaagccgtggactggcattactggtggtggctattgggctaacggtcgtcgtcctctggcgctggtgcgtactcacagtaagaaaggtctgatgcgctacgaagacgtttacatgcctgaggtgtacaaagcgattaacattgcgcaaaacaccgcctggtcgatcaacaagtgggtcctggcggtcgccaacgtaatcaccaagtggaagcattgtccggtcgaggacatccctgcgattgagcgtgaagaactcccgatgaaaccggaagacatcgacatgaatcctgaggctctcaccgcgtggaaacgtgctaaagctgctgtgtaccgcaaggacaaggctcgcaagtctcgccgtatcttgcttgagttcatgcttgagcaagccaataagtttgctaaccataaggccatctggttcccttacaacatggactggcgcggtcgtgtttacgctgtgtcaatgttcaacccgcaaggtaacgatatgaccaaaggactgcttacgctggcgaaaggtaaaccaatcggtaaggaaggttactactggctgaaaatccacggtgcaaactgtgcgggtgtcgataaggttccgttccctgagcgcatcaagttcattgaggaaaaccacgagaacatcatggcttgcgctaagtctccactggagaacacttggtgggctgagcaagatagtccgttctgcttccttgcgttctgctttgagtacgctggggtacagcaccacggcctgagctataactgctcccttccgctggcgtttgacgggtcttgctctggcatccagcacttctccgcgatgctccgagatgaggtaggtggtcgcgcggttaacttgcttcctagtgaaaccgttcaggacatctacgggattgttgctaagaaagtcaacgagattctacaagcagacgcaatcaatgggaccgataacgaagtagttaccgtgaccgatgagaacgaaggtgaaatctctgagaaagtcaagctgggcactaaggcactggctggtcaatggctggcatacggtgttactcgcagtgtgactaagcgttcagtcatgacgctggcttacgggtccaaagagttcggcttccgtcaacaagtgctgcgccacactattcagccagctattgattccggcaagggtctgatgttcactcagccgaatcaggctgctggatacatggctaagctgatttgggaatctgtgagcgtgacggtggtagctgcggttgaagcaatgaactggcttaagtctgctgctaagctgctggctgctgaggtcaaagataagaagactggagagattcttcgcaagcgttgcgctgtgcattgggtaactcctgatggtttccctgtgtggcaggaatacaagaagcctattcagacgcgcttgaacctgatgttcctcggtcagttccgcttacagcctaccattaacaccaacaaagatagcgagattgatgcacataaacaggtgtctggtatcgctcctaactttgtacacagccaagacggtagccaccttcgtaagactgtagtgtgggcacacgagaagtacggaatcgaatcttttgcactgattcacgactccttcggtaccattccggctgacgctgcgaacctgttcaaagcagtgcgcgaaactatggttgacacatatgagtcttgtgatgtactggctgatttctacgaccagttcgctgaccagttgcacgagtctcaattggacaaaatgccagcacttccggctaaaggtaacttgaacctccgtgacatcttagagtcggacttcgcgttcgcg

SEQ ID NO: 728 - protein, 890 aa, synthetic construct
  REGION 1..890: note = Variant of RNA polymerase
MHHHHHHMNTINIAKNDFSDIELAAIPFNTLVDHYGEGLAREQLALEHESYEMGETRFRKMFERQLKAGEVADNAAAKPLITTLLPKMIARINDWFEEVKAKRGKRPTAFQFLQEIKPEAVAYITIKTTLACLTSADRTTVQAVASAIGYAIEDEARFGRIRDLEAKHFLKNVEEQLNKRVGHVYKKAFMQVVEADMLSKGLLGGEAWSSWHKEDSIHVGVRCIEMLIESTGMVSLHRQNAGVVGKDSETIELAPEYAEAIATRAGALAGISPMFQPCVVPPKPWTGITGGGYWANGRRPLALVRTHSKKGLMRYEDVYMPEVYKAINIAQNTAWSINKWVLAVANVITKWKHCPVEDIPAIEREELPMKPEDIDMNPEALTAWKRAKAAVYRKDKARKSRRILLEFMLEQANKFANHKAIWFPYNMDWRGRVYAVSMFNPQGNDMTKGLLTLAKGKPIGKEGYYWLKIHGANCAGVDKVPFPERIKFIEENHENIMACAKSPLENTWWAEQDSPFCFLAFCFEYAGVQHHGLSYNCSLPLAFDGSCSGIQHFSAMLRDEVGGRAVNLLPSETVQDIYGIVAKKVNEILQADAINGTDNEVVTVTDENEGEISEKVKLGTKALAGQWLAYGVTRSVTKRSVMTLAYGSKEFGFRQQVLRHTIQPAIDSGKGLMFTQPNQAAGYMAKLIWESVSVTVVAAVEAMNWLKSAAKLLAAEVKDKKTGEILRKRCAVHWVTPDGFPVWQEYKKPIQTRLNLMFLGQFRLQPTINTNKDSEIDAHKQVSGIAPNFVHSQDGSHLRKTVVWAHEKYGIESFALIHDSFGTIPADAANLFKAVRETMVDTYESCDVLADFYDQFADQLHESQLDKMPALPAKGNLNLRDILESDFAFA

SEQ ID NO: 729 - DNA, 2670 bp, synthetic construct
  misc_feature 1..2670: note = Variant of RNA polymerase
  source 1..2670: mol_type = other DNA
atgcaccatcaccatcaccatatgaacacgattaacatcgctaagaacgacttctctgacatcgaactggctgctatcccgttcaacactctggtcgaccattacggtgagggtttagctcgcgaacagttggcccttgagcatgagtcttacgaaatgggtgaaactcgtttccgcaagatgtttgagcgtcaacttaaagctggtgaggttgcggataacgctgccgccaagcctctcatcactaccctactccctaagatgattgcacgcattaacgactggtttgaggaagtgaaagctaagcgcggcaagcgcccgacagccttccagttcctgcaagaaatcaagccggaagccgtagcgtacatcaccattaagaccactctggcttgcctaaccagtgcggaccgtacaaccgttcagaacgtagcaagcgcaatcggttatgccattgaggacgaggctcgcttcggtcgtatccgtgaccttgaagctaagcatttcctggaaaatgtggaggaacaactcaacaagcgcgtagggcacgtctacaagaaagcatttatgcaagttgtcgaggctgacatgctctctaagggtctactcggtggcgaggcgtggtcttcgtggcataaggaagactctattcatgtaggagtacgctgcatcgagatgctcattgagtcaaccggaatggttagcttacaccgccaaaatgctggcgtagtaggtaaggactctgagactatcgaactcgcacctgaatacgctgaggctattgcaacccgtgcaggtgcgctggctggcatctctccgatgttccaaccttgcgtagttcctcctaagccgtggactggcattactggtggtggctattgggctaacggtcgtcgtcctctggcgctggtgcgtactcacagtaagaaaggtctgatgcgctacgaagacgtttacatgcctgaggtgtacaaagcgattaacattgcgcaaaacaccgcctggtcgatcaacaagtgggtcctggcggtcgccaacgtaatcaccaagtggaagcattgtccggtcgaggacatccctgcgattgagcgtgaagaactcccgatgaaaccggaagacatcgacatgaatcctgaggctctcaccgcgtggaaacgtgctaaagctgctgtgtaccgcaaggacaaggctcgcaagtctcgccgtatcttgcttgagttcatgcttgagcaagccaataagtttgctaaccataaggccatctggttcccttacaacatggactggcgcggtcgtgtttacgctgtgtcaatgttcaacccgcaaggtaacgatatgaccaaaggactgcttacgctggcgaaaggtaaaccaatcggtaaggaaggttactactggctgaaaatccacggtgcaaactgtgcgggtgtcgataaggttccgttccctgagcgcatcaagttcattgaggaaaaccacgagaacatcatggcttgcgctaagtctccactggagaacacttggtgggctgagcaagatagtccgttctgcttccttgcgttctgctttgagtacgctggggtacagcaccacggcctgagctataactgctcccttccgctggcgtttgacgggtcttgctctggcatccagcacttctccgcgatgctccgagatgaggtaggtggtcgcgcggttaacttgcttcctagtgaaaccgttcaggacatctacgggattgttgctaagaaagtcaacgagattctacaagcagacgcaatcaatgggaccgataacgaagtagttaccgtgaccgatgagaacgaaggtgaaatctctgagaaagtcaagctgggcactaaggcactggctggtcaatggctggcatacggtgttactcgcagtgtgactaagcgttcagtcatgacgctggcttacgggtccaaagagttcggcttccgtcaacaagtgctggaacacactattcagccagctattgattccggcaagggtctgatgttcactcagccgaatcaggctgctggatacatggctaagctgatttgggaatctgtgagcgtgacggtggtagctgcggttgaagcaatgaactggcttaagtctgctgctaagctgctggctgctgaggtcaaagataagaagactggagagattcttcgcaagcgttgcgctgtgcattgggtaactcctgatggtttccctgtgtggcaggaatacaagaagcctattcagacgcgcttgaacctgatgttcctcggtcagttccgcttacagcctaccattaacaccaacaaagatagcgagattgatgcacataaacaggtgtctggtatcgctcctaactttgtacacagccaagacggtagccaccttcgtaagactgtagtgtgggcacacgagaagtacggaatcgaatcttttgcactgattcacgactccttcggtaccattccggctgacgctgcgaacctgttcaaagcagtgcgcgaaactatggttgacacatatgagtcttgtgatgtactggctgatttctacgaccagttcgctgaccagttgcacgagtctcaattggacaaaatgccagcacttccggctaaaggtaacttgaacctccgtgacatcttagagtcggacttcgcgttcgcg

SEQ ID NO: 730 - protein, 890 aa, synthetic construct
  REGION 1..890: note = Variant of RNA polymerase
MHHHHHHMNTINIAKNDFSDIELAAIPFNTLVDHYGEGLAREQLALEHESYEMGETRFRKMFERQLKAGEVADNAAAKPLITTLLPKMIARINDWFEEVKAKRGKRPTAFQFLQEIKPEAVAYITIKTTLACLTSADRTTVQNVASAIGYAIEDEARFGRIRDLEAKHFLENVEEQLNKRVGHVYKKAFMQVVEADMLSKGLLGGEAWSSWHKEDSIHVGVRCIEMLIESTGMVSLHRQNAGVVGKDSETIELAPEYAEAIATRAGALAGISPMFQPCVVPPKPWTGITGGGYWANGRRPLALVRTHSKKGLMRYEDVYMPEVYKAINIAQNTAWSINKWVLAVANVITKWKHCPVEDIPAIEREELPMKPEDIDMNPEALTAWKRAKAAVYRKDKARKSRRILLEFMLEQANKFANHKAIWFPYNMDWRGRVYAVSMFNPQGNDMTKGLLTLAKGKPIGKEGYYWLKIHGANCAGVDKVPFPERIKFIEENHENIMACAKSPLENTWWAEQDSPFCFLAFCFEYAGVQHHGLSYNCSLPLAFDGSCSGIQHFSAMLRDEVGGRAVNLLPSETVQDIYGIVAKKVNEILQADAINGTDNEVVTVTDENEGEISEKVKLGTKALAGQWLAYGVTRSVTKRSVMTLAYGSKEFGFRQQVLEHTIQPAIDSGKGLMFTQPNQAAGYMAKLIWESVSVTVVAAVEAMNWLKSAAKLLAAEVKDKKTGEILRKRCAVHWVTPDGFPVWQEYKKPIQTRLNLMFLGQFRLQPTINTNKDSEIDAHKQVSGIAPNFVHSQDGSHLRKTVVWAHEKYGIESFALIHDSFGTIPADAANLFKAVRETMVDTYESCDVLADFYDQFADQLHESQLDKMPALPAKGNLNLRDILESDFAFA

SEQ ID NO: 731 - DNA, 2670 bp, synthetic construct
  misc_feature 1..2670: note = Variant of RNA polymerase
  source 1..2670: mol_type = other DNA
atgcaccatcaccatcaccatatgaacacgattaacatcgctaagaacgacttctctgacatcgaactggctgctatcccgttcaacactctggtcgaccattacggtgagggtttagctcgcgaacagttggcccttgagcatgagtcttacgaaatgggtgaaactcgtttccgcaagatgtttgagcgtcaacttaaagctggtgaggttgcggataacgctgccgccaagcctctcatcactaccctactccctaagatgattgcacgcattaacgactggtttgaggaagtgaaagctaagcgcggcaagcgcccgacagccttccagttcctgcaagaaatcaagccggaagccgtagcgtacatcaccattaagaccactctggcttgcctaaccagtgcggaccgtacaaccgttcaggctgtagcaagcgcaatcggttatgccattgaggacgaggctcgcttcggtcgtatccgtgaccttgaagctaagcacttcctgaaaaacgttgaggaacaactcaacaagcgcgtagggcacgtctacaagaaagcatttatgcaagttgtcgaggctgacatgctctctaagggtctactcggtggcgaggcgtggtcttcgtggcataaggaagactctattcatgtaggagtacgctgcatcgagatgctcattgagtcaaccggaatggttagcttacaccgccaaaatgctggcgtagtaggtaaagactctgagactatcgaactcgcacctgaatacgctgaggctattgcaacccgtgcaggtgcgctggctggcatctctccgatgttccaaccttgcgtagttcctcctaagccgtggactggcattactggtggtggctattgggctaacggtcgtcgtcctctggcgctggtgcgtactcacagtaagaaaggtctgatgcgctacgaagacgtttacatgcctgaggtgtacaaagcgattaacattgcgcaaaacaccgcctggtcgatcaacaagtgggtcctggcggtcgccaacgtaatcaccaagtggaagcattgtccggtcgaggacatccctgcgattgagcgtgaagaacctccgatgaaaccggaagacatcgacatgaatcctgaggctctcaccgcgtggaaacgtgctaaagctgctgtgtaccgcaaggacaaggctcgcaagtctcgccgtatcttgcttgagttcatgcttgagcaagccaataagtttgctaaccataaggccatctggttcccttacaacatggactggcgcggtcgtgtttacgctgtgtcaatgttcaacccgcaaggtaacgatatgaccaaaggactgcttacgctggcgaaaggtaaaccaatcggtaaggaaggttactactggctgaaaatccacggtgcaaactgtgcgggtgtcgataaggttccgttccctgagcgcatcaagttcattgaggaaaaccacgagaacatcatggcttgcgctaagtctccactggagaacacttggtgggctgagcaagatagtccgttctgcttccttgcgttctgctttgagtacgctggggtacagcaccacggcctgagctataactgctcccttccgctggcgtttgacgggtcttgctctggcatccagcacttctccgcgatgctccgagatgaggtaggtggtcgcgcggttaacttgcttcctagtgaaaccgttcaggacatctacgggattgttgctaagaaagtcaacgagattctacaagcagacgcaatcaatgggaccgataacgaagtagttaccgtgaccgatgagaacgaaggtgaaatctctgagaaagtcaagctgggcactaaggcactggctggtcaatggctggcatacggtgttactcgcagtgtgactaagcgttcagtcatgacgctggcttacgggtccaaagagttcggcttccgtcaacaagtgctgcgctggactattcagccagctattgattccggcaagggtctgatgttcactcagccgaatcaggctgctggatacatggctaagctgatttgggaatctgtgagcgtgacggtggtagctgcggttgaagcaatgaactggcttaagtctgctgctaagctgctggctgctgaggtcaaagataagaagactggagagattcttcgcaagcgttgcgctgtgcattgggtaactcctgatggtttccctgtgtggcaggaatacaagaagcctattcagacgcgcttgaacctgatgttcctcggtcagttccgcttacagcctaccattaacaccaacaaagatagcgagattgatgcacataaacaggtgtctggtatcgctcctaactttgtacacagccaagacggtagccaccttcgtaagactgtagtgtgggcacacgagaagtacggaatcgaatcttttgcactgattcacgactccttcggtaccattccggctgacgctgcgaacctgttcaaagcagtgcgcgaaactatggttgacacatatgagtcttgtgatgtactggctgatttctacgaccagttcgctgaccagttgcacgagtctcaattggacaaaatgccagcacttccggctaaaggtaacttgaacctccgtgacatcttagagtcggacttcgcgttcgcg

SEQ ID NO: 732 - protein, 890 aa, synthetic construct
  REGION 1..890: note = Variant of RNA polymerase
MHHHHHHMNTINIAKNDFSDIELAAIPFNTLVDHYGEGLAREQLALEHESYEMGETRFRKMFERQLKAGEVADNAAAKPLITTLLPKMIARINDWFEEVKAKRGKRPTAFQFLQEIKPEAVAYITIKTTLACLTSADRTTVQAVASAIGYAIEDEARFGRIRDLEAKHFLKNVEEQLNKRVGHVYKKAFMQVVEADMLSKGLLGGEAWSSWHKEDSIHVGVRCIEMLIESTGMVSLHRQNAGVVGKDSETIELAPEYAEAIATRAGALAGISPMFQPCVVPPKPWTGITGGGYWANGRRPLALVRTHSKKGLMRYEDVYMPEVYKAINIAQNTAWSINKWVLAVANVITKWKHCPVEDIPAIEREEPPMKPEDIDMNPEALTAWKRAKAAVYRKDKARKSRRILLEFMLEQANKFANHKAIWFPYNMDWRGRVYAVSMFNPQGNDMTKGLLTLAKGKPIGKEGYYWLKIHGANCAGVDKVPFPERIKFIEENHENIMACAKSPLENTWWAEQDSPFCFLAFCFEYAGVQHHGLSYNCSLPLAFDGSCSGIQHFSAMLRDEVGGRAVNLLPSETVQDIYGIVAKKVNEILQADAINGTDNEVVTVTDENEGEISEKVKLGTKALAGQWLAYGVTRSVTKRSVMTLAYGSKEFGFRQQVLRWTIQPAIDSGKGLMFTQPNQAAGYMAKLIWESVSVTVVAAVEAMNWLKSAAKLLAAEVKDKKTGEILRKRCAVHWVTPDGFPVWQEYKKPIQTRLNLMFLGQFRLQPTINTNKDSEIDAHKQVSGIAPNFVHSQDGSHLRKTVVWAHEKYGIESFALIHDSFGTIPADAANLFKAVRETMVDTYESCDVLADFYDQFADQLHESQLDKMPALPAKGNLNLRDILESDFAFA

SEQ ID NO: 733 - DNA, 2670 bp, synthetic construct
  misc_feature 1..2670: note = Variant of RNA polymerase
  source 1..2670: mol_type = other DNA
atgcaccatcaccatcaccatatgaacacgattaacatcgctaagaacgacttctctgacatcgaactggctgctatcccgttcaacactctggtcgaccattacggtgagggtttagctcgcgaacagttggcccttgagcatgagtcttacgaaatgggtgaaactcgtttccgcaagatgtttgagcgtcaacttaaagctggtgaggttgcggataacgctgccgccaagcctctcatcactaccctactccctaagatgattgcacgcattaacgactggtttgaggaagtgaaagctaagcgcggcaagcgcccgacagccttccagttcctgcaagaaatcaagccggaagccgtagcgtacatcaccattaagaccactctggcttgcctaaccagtgcggaccgtacaaccgttcaggctgtagcaagcgcaatcggttatgccattgaggacgaggctcgcttcggtcgtatccgtgaccttgaagctaagcacttcctgaaaaacgttgaggaacaactcaacaagcgcgtagggcacgtctacaagaaagcatttatgcaagttgtcgaggctgacatgctctctaagggtctactcggtggcgaggcgtggtcttcgtggcataaggaagactctattcatgtaggagtacgctgcatcgagatgctcattgagtcaaccggaatggttagcttacaccgccaaaatgctggcgtagtaggtaaagactctgagactatcgaactcgcacctgaatacgctgaggctattgcaacccgtgcaggtgcgctggctggcatctctccgatgttccaaccttgcgtagttcctcctaagccgtggactggcattactggtggtggctattgggctaacggtcgtcgtcctctggcgctggtgcgtactcacagtaagaaaggtctgatgcgctacgaagacgtttacatgcctgaggtgtacaaagcgattaacattgcgcaaaacaccgcctggtcgatcaacaagtgggtcctggcggtcgccaacgtaatcaccaagtggaagcattgtccggtcgaggacatccctgcgattgagcgtgaagaactcccgatgaaaccggaagacatcgacatgaatcctgaggctctccgggcgtggaaacgtgctaaagctgctgtgtaccgcaaggacaaggctcgcaagtctcgccgtatcttgcttgagttcatgcttgagcaagccaataagtttgctaaccataaggccatctggttcccttacaacatggactggcgcggtcgtgtttacgctgtgtcaatgttcaacccgcaaggtaacgatatgaccaaaggactgcttacgctggcgaaaggtaaaccaatcggtaaggaaggttactactggctgaaaatccacggtgcaaactgtgcgggtgtcgataaggttccgttccctgagcgcatcaagttcattgaggaaaaccacgagaacatcatggcttgcgctaagtctccactggagaacacttggtgggctgagcaagatagtccgttctgcttccttgcgttctgctttgagtacgctggggtacagcaccacggcctgagctataactgctcccttccgctggcgtttgacgggtcttgctctggcatccagcacttctccgcgatgctccgagatgaggtaggtggtcgcgcggttaacttgcttcctagtgaaaccgttcaggacatctacgggattgttgctaagaaagtcaacgagattctacaagcagacgcaatcaatgggaccgataacgaagtagttaccgtgaccgatgagaacgaaggtgaaatctctgagaaagtcaagctgggcactaaggcactggctggtcaatggctggcatacggtgttactcgcagtgtgactaagcgttcagtcatgacgctggcttacgggtccaaagagttcggcttccgtcaacaagtgctgcgctggactattcagccagctattgattccggcaagggtctgatgttcactcagccgaatcaggctgctggatacatggctaagctgatttgggaatctgtgagcgtgacggtggtagctgcggttgaagcaatgaactggcttaagtctgctgctaagctgctggctgctgaggtcaaagataagaagactggagagattcttcgcaagcgttgcgctgtgcattgggtaactcctgatggtttccctgtgtggcaggaatacaagaagcctattcagacgcgcttgaacctgatgttcctcggtcagttccgcttacagcctaccattaacaccaacaaagatagcgagattgatgcacataaacaggtgtctggtatcgctcctaactttgtacacagccaagacggtagccaccttcgtaagactgtagtgtgggcacacgagaagtacggaatcgaatcttttgcactgattcacgactccttcggtaccattccggctgacgctgcgaacctgttcaaagcagtgcgcgaaactatggttgacacatatgagtcttgtgatgtactggctgatttctacgaccagttcgctgaccagttgcacgagtctcaattggacaaaatgccagcacttccggctaaaggtaacttgaacctccgtgacatcttagagtcggacttcgcgttcgcg

SEQ ID NO: 734 - protein, 890 aa, synthetic construct
  REGION 1..890: note = Variant of RNA polymerase
MHHHHHHMNTINIAKNDFSDIELAAIPFNTLVDHYGEGLAREQLALEHESYEMGETRFRKMFERQLKAGEVADNAAAKPLITTLLPKMIARINDWFEEVKAKRGKRPTAFQFLQEIKPEAVAYITIKTTLACLTSADRTTVQAVASAIGYAIEDEARFGRIRDLEAKHFLKNVEEQLNKRVGHVYKKAFMQVVEADMLSKGLLGGEAWSSWHKEDSIHVGVRCIEMLIESTGMVSLHRQNAGVVGKDSETIELAPEYAEAIATRAGALAGISPMFQPCVVPPKPWTGITGGGYWANGRRPLALVRTHSKKGLMRYEDVYMPEVYKAINIAQNTAWSINKWVLAVANVITKWKHCPVEDIPAIEREELPMKPEDIDMNPEALRAWKRAKAAVYRKDKARKSRRILLEFMLEQANKFANHKAIWFPYNMDWRGRVYAVSMFNPQGNDMTKGLLTLAKGKPIGKEGYYWLKIHGANCAGVDKVPFPERIKFIEENHENIMACAKSPLENTWWAEQDSPFCFLAFCFEYAGVQHHGLSYNCSLPLAFDGSCSGIQHFSAMLRDEVGGRAVNLLPSETVQDIYGIVAKKVNEILQADAINGTDNEVVTVTDENEGEISEKVKLGTKALAGQWLAYGVTRSVTKRSVMTLAYGSKEFGFRQQVLRWTIQPAIDSGKGLMFTQPNQAAGYMAKLIWESVSVTVVAAVEAMNWLKSAAKLLAAEVKDKKTGEILRKRCAVHWVTPDGFPVWQEYKKPIQTRLNLMFLGQFRLQPTINTNKDSEIDAHKQVSGIAPNFVHSQDGSHLRKTVVWAHEKYGIESFALIHDSFGTIPADAANLFKAVRETMVDTYESCDVLADFYDQFADQLHESQLDKMPALPAKGNLNLRDILESDFAFA

SEQ ID NO: 735 - DNA, 2670 bp, synthetic construct
  misc_feature 1..2670: note = Variant of RNA polymerase
  source 1..2670: mol_type = other DNA
atgcaccatcaccatcaccatatgaacacgattaacatcgctaagaacgacttctctgacatcgaactggctgctatcccgttcaacactctggtcgaccattacggtgagggtttagctcgcgaacagttggcccttgagcatgagtcttacgaaatgggtgaaactcgtttccgcaagatgtttgagcgtcaacttaaagctggtgaggttgcggataacgctgccgccaagcctctcatcactaccctactccctaagatgattgcacgcattaacgactggtttgaggaagtgaaagctaagcgcggcaagcgcccgacagccttccagttcctgcaagaaatcaagccggaagccgtagcgtacatcaccattaagaccactctggcttgcctaaccagtgcggaccgtacaaccgttcaggctgtagcaagcgcaatcggttatgccattgaggacgaggctcgcttcggtcgtatccgtgaccttgaagctaagcacttcctgaaaaacgttgaggaacaactcaacaagcgcgtagggcacgtctacaagaaagcatttatgcaagttgtcgaggctgacatgctctctaagggtctactcggtggcgaggcgtggtcttcgtggcataaggaagactctattcatgtaggagtacgctgcatcgagatgctcattgagtcaaccggaatggttagcttacaccgccaaaatgctggcgtagtaggtaaagactctgagactatcgaactcgcacctgaatacgctgaggctattgcaacccgtgcaggtgcgctggctggcatctctccgatgttccaaccttgcgtagttcctcctaagccgtggactggcattactggtggtggctattgggctaacggtcgtcgtcctctggcgctggtgcgtactcacagtaagaaaggtctgatgcgctacgaagacgtttacatgcctgaggtgtacaaagcgattaacattgcgcaaaacaccgcctggtcgatcaacaagtgggtcctggcggtcgccaacgtaatcaccaagtggaagcattgtccggtcgaggacatccctgcgattgagcgtgaagaactcccgatgaaaccggaagacatcgacatgaatcctgaggctctcaccgcgtggaaacgtgctaaagctgctgtgtaccgcaaggacaaggctcgcaagtctcgccgtatcttgcttgagttcatgcttgagcaagccaataagtttgctaaccataaggccatctggttcccttacaacatggactggcgcggtcgtgtttacgctgtgtcaatgttcaacccgcaaggtaacgatatgaccaaaggactgcttacgctggcgaaaggtaaaccaatcggtaaggaaggttactactggctgaaaatccacggtgcaaactgtgcgggtgtcgataaggttccgttccctgagcgcatcaagttcattgaggaaaaccacgagaacatcatggcttgcgctaagtctccactggagaacacttggtgggctgagcaagatagtccgttctgcttccttgcgttctgctttgagtacgctggggtacagcaccacggcctgagctataactgctcccttccgctggcgtttgacgggtcttgctctggcatccagcacttctccgcgatgctccgagatgaggtaggtggtcgcgcggttaacttgcttcctagtgaaaccgttcaggacatctacgggattgttgctaagaaagtcaacgagattctacaagcagacgcaatcaatgggaccgataacgaagtagttaccgtgaccgatgagaacgaaggtgaaatctctgagaaagtcaagctgggcactaaggcactggctggtcaatggctggcatacggtgttactcgcagtgtgactaagcgttcagtcatgacgctggcttacgggtccaaagagttcggcttccgtcaacaagtgctgcgctggactattcagccagctattgattccggccgtggtctgatgttcactcagccgaatcaggctgctggatacatggctaagctgatttgggaatctgtgagcgtgacggtggtagctgcggttgaagcaatgaactggcttaagtctgctgctaagctgctggctgctgaggtcaaagataagaagactggagagattcttcgcaagcgttgcgctgtgcattgggtaactcctgatggtttccctgtgtggcaggaatacaagaagcctattcagacgcgcttgaacctgatgttcctcggtcagttccgcttacagcctaccattaacaccaacaaagatagcgagattgatgcacataaacaggtgtctggtatcgctcctaactttgtacacagccaagacggtagccaccttcgtaagactgtagtgtgggcacacgagaagtacggaatcgaatcttttgcactgattcacgactccttcggtaccattccggctgacgctgcgaacctgttcaaagcagtgcgcgaaactatggttgacacatatgagtcttgtgatgtactggctgatttctacgaccagttcgctgaccagttgcacgagtctcaattggacaaaatgccagcacttccggctaaaggtaacttgaacctccgtgacatcttagagtcggacttcgcgttcgcg

SEQ ID NO: 736 - protein, 890 aa, synthetic construct
  REGION 1..890: note = Variant of RNA polymerase
MHHHHHHMNTINIAKNDFSDIELAAIPFNTLVDHYGEGLAREQLALEHESYEMGETRFRKMFERQLKAGEVADNAAAKPLITTLLPKMIARINDWFEEVKAKRGKRPTAFQFLQEIKPEAVAYITIKTTLACLTSADRTTVQAVASAIGYAIEDEARFGRIRDLEAKHFLKNVEEQLNKRVGHVYKKAFMQVVEADMLSKGLLGGEAWSSWHKEDSIHVGVRCIEMLIESTGMVSLHRQNAGVVGKDSETIELAPEYAEAIATRAGALAGISPMFQPCVVPPKPWTGITGGGYWANGRRPLALVRTHSKKGLMRYEDVYMPEVYKAINIAQNTAWSINKWVLAVANVITKWKHCPVEDIPAIEREELPMKPEDIDMNPEALTAWKRAKAAVYRKDKARKSRRILLEFMLEQANKFANHKAIWFPYNMDWRGRVYAVSMFNPQGNDMTKGLLTLAKGKPIGKEGYYWLKIHGANCAGVDKVPFPERIKFIEENHENIMACAKSPLENTWWAEQDSPFCFLAFCFEYAGVQHHGLSYNCSLPLAFDGSCSGIQHFSAMLRDEVGGRAVNLLPSETVQDIYGIVAKKVNEILQADAINGTDNEVVTVTDENEGEISEKVKLGTKALAGQWLAYGVTRSVTKRSVMTLAYGSKEFGFRQQVLRWTIQPAIDSGRGLMFTQPNQAAGYMAKLIWESVSVTVVAAVEAMNWLKSAAKLLAAEVKDKKTGEILRKRCAVHWVTPDGFPVWQEYKKPIQTRLNLMFLGQFRLQPTINTNKDSEIDAHKQVSGIAPNFVHSQDGSHLRKTVVWAHEKYGIESFALIHDSFGTIPADAANLFKAVRETMVDTYESCDVLADFYDQFADQLHESQLDKMPALPAKGNLNLRDILESDFAFA

SEQ ID NO: 737 - DNA, 2670 bp, synthetic construct
  misc_feature 1..2670: note = Variant of RNA polymerase
  source 1..2670: mol_type = other DNA
atgcaccatcaccatcaccatatgaacacgattaacatcgctaagaacgacttctctgacatcgaactggctgctatcccgttcaacactctggtcgaccattacggtgagggtttagctcgcgaacagttggcccttgagcatgagtcttacgaaatgggtgaaactcgtttccgcaagatgtttgagcgtcaacttaaagctggtgaggttgcggataacgctgccgccaagcctctcatcactaccctactccctaagatgattgcacgcattaacgactggtttgaggaagtgaaagctaagcgcggcaagcgcccgacagccttccagttcctgcaagaaatcaagccggaagccgtagcgtacatcaccattaagaccactctggcttgcctaaccagtgcggaccgtacaaccgttcaggctgtagcaagcgcaatcggttatgccattgaggacgaggctcgcttcggtcgtatccgtgaccttgaagctaagcacttcctgaaaaacgttgaggaacaactcaacaagcgcgtagggcacgtctacaagaaagcatttatgcaagttgtcgaggctgacatgctctctaagggtctactcggtggcgaggcgtggtcttcgtggcataaggaagactctattcatgtaggagtacgctgcatcgagatgctcattgagtcaaccggaatggttagcttacaccgccaaaatgctggcgtagtaggtaaagactctgagactatcgaactcgcacctgaatacgctgaggctattgcaacccgtgcaggtgcgctggctggcatctctccgatgttccaaccttgcgtagttcctcctaagccgtggactggcattactggtggtggctattgggctaacggtcgtcgtcctctggcgctggtgcgtactcacagtaagaaaggtctgatgcgctacgaagacgtttacatgcctgaggtgtacaaagcgattaacattgcgcaaaacaccgcctggtcgatcaacaagtgggtcctggcggtcgccaacgtaatcaccaagtggaagcattgtccggtcgaggacatccctgcgattgagcgtgaagaactcccgatgaaaccggaagacatcgacatgaatcctgaggctctccttgcgtggaaacgtgctaaagctgctgtgtaccgcaaggacaaggctcgcaagtctcgccgtatcttgcttgagttcatgcttgagcaagccaataagtttgctaaccataaggccatctggttcccttacaacatggactggcgcggtcgtgtttacgctgtgtcaatgttcaacccgcaaggtaacgatatgaccaaaggactgcttacgctggcgaaaggtaaaccaatcggtaaggaaggttactactggctgaaaatccacggtgcaaactgtgcgggtgtcgataaggttccgttccctgagcgcatcaagttcattgaggaaaaccacgagaacatcatggcttgcgctaagtctccactggagaacacttggtgggctgagcaagatagtccgttctgcttccttgcgttctgctttgagtacgctggggtacagcaccacggcctgagctataactgctcccttccgctggcgtttgacgggtcttgctctggcatccagcacttctccgcgatgctccgagatgaggtaggtggtcgcgcggttaacttgcttcctagtgaaaccgttcaggacatctacgggattgttgctaagaaagtcaacgagattctacaagcagacgcaatcaatgggaccgataacgaagtagttaccgtgaccgatgagaacgaaggtgaaatctctgagaaagtcaagctgggcactaaggcactggctggtcaatggctggcatacggtgttactcgcagtgtgactaagcgttcagtcatgacgctggcttacgggtccaaagagttcggcttccgtcaacaagtgctgcgctggactattcagccagctattgattccggcaagggtctgatgttcactcagccgaatcaggctgctggatacatggctaagctgatttgggaatctgtgagcgtgacggtggtagctgcggttgaagcaatgaactggcttaagtctgctgctaagctgctggctgctgaggtcaaagataagaagactggagagattcttcgcaagcgttgcgctgtgcattgggtaactcctgatggtttccctgtgtggcaggaatacaagaagcctattcagacgcgcttgaacctgatgttcctcggtcagttccgcttacagcctaccattaacaccaacaaagatagcgagattgatgcacataaacaggtgtctggtatcgctcctaactttgtacacagccaagacggtagccaccttcgtaagactgtagtgtgggcacacgagaagtacggaatcgaatcttttgcactgattcacgactccttcggtaccattccggctgacgctgcgaacctgttcaaagcagtgcgcgaaactatggttgacacatatgagtcttgtgatgtactggctgatttctacgaccagttcgctgaccagttgcacgagtctcaattggacaaaatgccagcacttccggctaaaggtaacttgaacctccgtgacatcttagagtcggacttcgcgttcgcg

SEQ ID NO: 738 - protein, 890 aa, synthetic construct
  REGION 1..890: note = Variant of RNA polymerase
MHHHHHHMNTINIAKNDFSDIELAAIPFNTLVDHYGEGLAREQLALEHESYEMGETRFRKMFERQLKAGEVADNAAAKPLITTLLPKMIARINDWFEEVKAKRGKRPTAFQFLQEIKPEAVAYITIKTTLACLTSADRTTVQAVASAIGYAIEDEARFGRIRDLEAKHFLKNVEEQLNKRVGHVYKKAFMQVVEADMLSKGLLGGEAWSSWHKEDSIHVGVRCIEMLIESTGMVSLHRQNAGVVGKDSETIELAPEYAEAIATRAGALAGISPMFQPCVVPPKPWTGITGGGYWANGRRPLALVRTHSKKGLMRYEDVYMPEVYKAINIAQNTAWSINKWVLAVANVITKWKHCPVEDIPAIEREELPMKPEDIDMNPEALLAWKRAKAAVYRKDKARKSRRILLEFMLEQANKFANHKAIWFPYNMDWRGRVYAVSMFNPQGNDMTKGLLTLAKGKPIGKEGYYWLKIHGANCAGVDKVPFPERIKFIEENHENIMACAKSPLENTWWAEQDSPFCFLAFCFEYAGVQHHGLSYNCSLPLAFDGSCSGIQHFSAMLRDEVGGRAVNLLPSETVQDIYGIVAKKVNEILQADAINGTDNEVVTVTDENEGEISEKVKLGTKALAGQWLAYGVTRSVTKRSVMTLAYGSKEFGFRQQVLRWTIQPAIDSGKGLMFTQPNQAAGYMAKLIWESVSVTVVAAVEAMNWLKSAAKLLAAEVKDKKTGEILRKRCAVHWVTPDGFPVWQEYKKPIQTRLNLMFLGQFRLQPTINTNKDSEIDAHKQVSGIAPNFVHSQDGSHLRKTVVWAHEKYGIESFALIHDSFGTIPADAANLFKAVRETMVDTYESCDVLADFYDQFADQLHESQLDKMPALPAKGNLNLRDILESDFAFA

SEQ ID NO: 739 - DNA, 2670 bp, synthetic construct
  misc_feature 1..2670: note = Variant of RNA polymerase
  source 1..2670: mol_type = other DNA
atgcaccatcaccatcaccatatgaacacgattaacatcgctaagaacgacttctctgacatcgaactggctgctatcccgttcaacactctggtcgaccattacggtgagggtttagctcgcgaacagttggcccttgagcatgagtcttacgaaatgggtgaaactcgtttccgcaagatgtttgagcgtcaacttaaagctggtgaggttgcggataacgctgccgccaagcctctcatcactaccctactccctaagatgattgcacgcattaacgactggtttgaggaagtgaaagctaagcgcggcaagcgcccgacagccttccagttcctgcaagaaatcaagccggaagccgtagcgtacatcaccattaagaccactctggcttgcctaaccagtgcggaccgtacaaccgttcaggctgtagcaagcgcaatcggttatgccattgaggacgaggctcgcttcggtcgtatccgtgaccttgaagctaagcacttcctgaaaaacgttgaggaacaactcaacaagcgcgtagggcacgtctacaagaaagcatttatgcaagttgtcgaggctgacatgctctctaagggtctactcggtggcgaggcgtggtcttcgtggcataaggaagactctattcatgtaggagtacgctgcatcgagatgctcattgagtcaaccggaatggttagcttacaccgccaaaatgctggcgtagtaggtaaagactctgagactatcgaactcgcacctgaatacgctgaggctattgcaacccgtgcaggtgcgctggctggcatctctccgatgttccaaccttgcgtagttcctcctaagccgtggactggcattactggtggtggctattgggctaacggtcgtcgtcctctggcgctggtgcgtactcacagtaagaaaggtctgatgcgctacgaagacgtttacatgcctgaggtgtacaaagcgattaacattgcgcaaaacaccgcctggtcgatcaacaagtgggtcctggcggtcgccaacgtaatcaccaagtggaagcattgtccggtcgaggacatccctgcgattgagcgtgaagaactcccgatgaaaccggaagacatcgacatgaatcctgaggctctcaccgcgtggaaacgtgctaaagctgctgtgtaccgcaaggacaaggctcgcaagtctcgccgtatcttgcttgagttcatgcttgagcaagccaataagtttgctaaccataaggccatctggttcccttacaacatggactggcgcggtcgtgtttacgctgtgtcaatgttcaacccgcaaggtaacgatatgaccaaaggactgcttacgctggcgaaaggtaaaccaatcggtaaggaaggttactactggctgaaaatccacggtgcaaactgtgcgggtgtcgataaggttccgttccctgagcgcatcaagttcattgaggaaaaccacgagaacatcatggcttgcgctaagtctccactggagaacacttggtgggctgagcaagatagtccgttctgcttccttgcgttctgctttgagtacgctggggtacagcaccacggcctgagctataactgctcccttccgctggcgtttgacgggtcttgctctggcatccagcacttctccgcgatgctccgagatgaggtaggtggtcgcgcggttaacttgcttcctagtgaaaccgttcaggacatctacgggattgttgctaagaaagtcaacgagattctacaagcagacgcaatcaatgggaccgataacgaagtagttaccgtgaccgatgagaacgaaggtgaaatctctgagaaagtcaagctgggcactaaggcactggctggtcaatggctggcatacggtgttactcgcagtgtgactaagcgttcagtcatgacgctggcttacgggtccaaagagttcggcttccgtcaacaagtgctgcgctggactattcagccagctattgattccggcaagggtcctatgttcactcagccgaatcaggctgctggatacatggctaagctgatttgggaatctgtgagcgtgacggtggtagctgcggttgaagcaatgaactggcttaagtctgctgctaagctgctggctgctgaggtcaaagataagaagactggagagattcttcgcaagcgttgcgctgtgcattgggtaactcctgatggtttccctgtgtggcaggaatacaagaagcctattcagacgcgcttgaacctgatgttcctcggtcagttccgcttacagcctaccattaacaccaacaaagatagcgagattgatgcacataaacaggtgtctggtatcgctcctaactttgtacacagccaagacggtagccaccttcgtaagactgtagtgtgggcacacgagaagtacggaatcgaatcttttgcactgattcacgactccttcggtaccattccggctgacgctgcgaacctgttcaaagcagtgcgcgaaactatggttgacacatatgagtcttgtgatgtactggctgatttctacgaccagttcgctgaccagttgcacgagtctcaattggacaaaatgccagcacttccggctaaaggtaacttgaacctccgtgacatcttagagtcggacttcgcgttcgcg

SEQ ID NO: 740 - protein, 890 aa, synthetic construct
  REGION 1..890: note = Variant of RNA polymerase
MHHHHHHMNTINIAKNDFSDIELAAIPFNTLVDHYGEGLAREQLALEHESYEMGETRFRKMFERQLKAGEVADNAAAKPLITTLLPKMIARINDWFEEVKAKRGKRPTAFQFLQEIKPEAVAYITIKTTLACLTSADRTTVQAVASAIGYAIEDEARFGRIRDLEAKHFLKNVEEQLNKRVGHVYKKAFMQVVEADMLSKGLLGGEAWSSWHKEDSIHVGVRCIEMLIESTGMVSLHRQNAGVVGKDSETIELAPEYAEAIATRAGALAGISPMFQPCVVPPKPWTGITGGGYWANGRRPLALVRTHSKKGLMRYEDVYMPEVYKAINIAQNTAWSINKWVLAVANVITKWKHCPVEDIPAIEREELPMKPEDIDMNPEALTAWKRAKAAVYRKDKARKSRRILLEFMLEQANKFANHKAIWFPYNMDWRGRVYAVSMFNPQGNDMTKGLLTLAKGKPIGKEGYYWLKIHGANCAGVDKVPFPERIKFIEENHENIMACAKSPLENTWWAEQDSPFCFLAFCFEYAGVQHHGLSYNCSLPLAFDGSCSGIQHFSAMLRDEVGGRAVNLLPSETVQDIYGIVAKKVNEILQADAINGTDNEVVTVTDENEGEISEKVKLGTKALAGQWLAYGVTRSVTKRSVMTLAYGSKEFGFRQQVLRWTIQPAIDSGKGPMFTQPNQAAGYMAKLIWESVSVTVVAAVEAMNWLKSAAKLLAAEVKDKKTGEILRKRCAVHWVTPDGFPVWQEYKKPIQTRLNLMFLGQFRLQPTINTNKDSEIDAHKQVSGIAPNFVHSQDGSHLRKTVVWAHEKYGIESFALIHDSFGTIPADAANLFKAVRETMVDTYESCDVLADFYDQFADQLHESQLDKMPALPAKGNLNLRDILESDFAFA

SEQ ID NO: 741 - DNA, 2670 bp, synthetic construct
  misc_feature 1..2670: note = Variant of RNA polymerase
  source 1..2670: mol_type = other DNA
atgcaccatcaccatcaccatatgaacacgattaacatcgctaagaacgacttctctgacatcgaactggctgctatcccgttcaacactctggtcgaccattacggtgagggtttagctcgcgaacagttggcccttgagcatgagtcttacgaaatgggtgaaactcgtttccgcaagatgtttgagcgtcaacttaaagctggtgaggttgcggataacgctgccgccaagcctctcatcactaccctactccctaagatgattgcacgcattaacgactggtttgaggaagtgaaagctaagcgcggcaagcgcccgacagccttccagttcctgcaagaaatcaagccggaagccgtagcgtacatcaccattaagaccactctggcttgcctaaccagtgcggaccgtacaaccgttcaggctgtagcaagcgcaatcggttatgccattgaggacgaggctcgcttcggtcgtatccgtgaccttgaagctaagcacttcctgaaaaacgttgaggaacaactcaacaagcgcgtagggcacgtctacaagaaagcatttatgcaagttgtcgaggctgacatgctctctaagggtctactcggtggcgaggcgtggtcttcgtggcataaggaagactctattcatgtaggagtacgctgcatcgagatgctcattgagtcaaccggaatggttagcttacaccgccaaaatgctggcgtagtaggtaaagactctgagactatcgaactcgcacctgaatacgctgaggctattgcaacccgtgcaggtgcgctggctggcatctctccgatgttccaaccttgcgtagttcctcctaagccgtggactggcattactggtggtggctattgggctaacggtcgtcgtcctctggcgctggtgcgtactcacagtaagaaaggtctgatgcgctacgaagacgtttacatgcctgaggtgtacaaagcgattaacattgcgcaaaacaccgcctggtcgatcaacaagtgggtcctggcggtcgccaacgtaatcaccaagtggaagcattgtccggtccctgacatccctgcgattgagcgtgaagaactcccgatgaaaccggaagacatcgacatgaatcctgaggctctcaccgcgtggaaacgtgctaaagctgctgtgtaccgcaaggacaaggctcgcaagtctcgccgtatcttgcttgagttcatgcttgagcaagccaataagtttgctaaccataaggccatctggttcccttacaacatggactggcgcggtcgtgtttacgctgtgtcaatgttcaacccgcaaggtaacgatatgaccaaaggactgcttacgctggcgaaaggtaaaccaatcggtaaggaaggttactactggctgaaaatccacggtgcaaactgtgcgggtgtcgataaggttccgttccctgagcgcatcaagttcattgaggaaaaccacgagaacatcatggcttgcgctaagtctccactggagaacacttggtgggctgagcaagatagtccgttctgcttccttgcgttctgctttgagtacgctggggtacagcaccacggcctgagctataactgctcccttccgctggcgtttgacgggtcttgctctggcatccagcacttctccgcgatgctccgagatgaggtaggtggtcgcgcggttaacttgcttcctagtgaaaccgttcaggacatctacgggattgttgctaagaaagtcaacgagattctacaagcagacgcaatcaatgggaccgataacgaagtagttaccgtgaccgatgagaacgaaggtgaaatctctgagaaagtcaagctgggcactaaggcactggctggtcaatggctggcatacggtgttactcgcagtgtgactaagcgttcagtcatgacgctggcttacgggtccaaagagttcggcttccgtcaacaagtgctgcgctggactattcagccagctattgattccggcaagggtctgatgttcactcagccgaatcaggctgctggatacatggctaagctgatttgggaatctgtgagcgtgacggtggtagctgcggttgaagcaatgaactggcttaagtctgctgctaagctgctggctgctgaggtcaaagataagaagactggagagattcttcgcaagcgttgcgctgtgcattgggtaactcctgatggtttccctgtgtggcaggaatacaagaagcctattcagacgcgcttgaacctgatgttcctcggtcagttccgcttacagcctaccattaacaccaacaaagatagcgagattgatgcacataaacaggtgtctggtatcgctcctaactttgtacacagccaagacggtagccaccttcgtaagactgtagtgtgggcacacgagaagtacggaatcgaatcttttgcactgattcacgactccttcggtaccattccggctgacgctgcgaacctgttcaaagcagtgcgcgaaactatggttgacacatatgagtcttgtgatgtactggctgatttctacgaccagttcgctgaccagttgcacgagtctcaattggacaaaatgccagcacttccggctaaaggtaacttgaacctccgtgacatcttagagtcggacttcgcgttcgcg

SEQ ID NO: 742 - protein, 890 aa, synthetic construct
  REGION 1..890: note = Variant of RNA polymerase
MHHHHHHMNTINIAKNDFSDIELAAIPFNTLVDHYGEGLAREQLALEHESYEMGETRFRKMFERQLKAGEVADNAAAKPLITTLLPKMIARINDWFEEVKAKRGKRPTAFQFLQEIKPEAVAYITIKTTLACLTSADRTTVQAVASAIGYAIEDEARFGRIRDLEAKHFLKNVEEQLNKRVGHVYKKAFMQVVEADMLSKGLLGGEAWSSWHKEDSIHVGVRCIEMLIESTGMVSLHRQNAGVVGKDSETIELAPEYAEAIATRAGALAGISPMFQPCVVPPKPWTGITGGGYWANGRRPLALVRTHSKKGLMRYEDVYMPEVYKAINIAQNTAWSINKWVLAVANVITKWKHCPVPDIPAIEREELPMKPEDIDMNPEALTAWKRAKAAVYRKDKARKSRRILLEFMLEQANKFANHKAIWFPYNMDWRGRVYAVSMFNPQGNDMTKGLLTLAKGKPIGKEGYYWLKIHGANCAGVDKVPFPERIKFIEENHENIMACAKSPLENTWWAEQDSPFCFLAFCFEYAGVQHHGLSYNCSLPLAFDGSCSGIQHFSAMLRDEVGGRAVNLLPSETVQDIYGIVAKKVNEILQADAINGTDNEVVTVTDENEGEISEKVKLGTKALAGQWLAYGVTRSVTKRSVMTLAYGSKEFGFRQQVLRWTIQPAIDSGKGLMFTQPNQAAGYMAKLIWESVSVTVVAAVEAMNWLKSAAKLLAAEVKDKKTGEILRKRCAVHWVTPDGFPVWQEYKKPIQTRLNLMFLGQFRLQPTINTNKDSEIDAHKQVSGIAPNFVHSQDGSHLRKTVVWAHEKYGIESFALIHDSFGTIPADAANLFKAVRETMVDTYESCDVLADFYDQFADQLHESQLDKMPALPAKGNLNLRDILESDFAFA

SEQ ID NO: 743 - DNA, 2670 bp, synthetic construct
  misc_feature 1..2670: note = Variant of RNA polymerase
  source 1..2670: mol_type = other DNA
atgcaccatcaccatcaccatatgaacacgattaacatcgctaagaacgacttctctgacatcgaactggctgctatcccgttcaacactctggtcgaccattacggtgagggtttagctcgcgaacagttggcccttgagcatgagtcttacgaaatgggtgaaactcgtttccgcaagatgtttgagcgtcaacttaaagctggtgaggttgcggataacgctgccgccaagcctctcatcactaccctactccctaagatgattgcacgcattaacgactggtttgaggaagtgaaagctaagcgcggcaagcgcccgacagccttccagttcctgcaagaaatcaagccggaagccgtagcgtacatcaccattaagaccactctggcttgcctaaccagtgcggaccgtacaaccgttcaggctgtagcaagcgcaatcggttatgccattgaggacgaggctcgcttcggtcgtatccgtgaccttgaagctaagcacttcctgaaaaacgttgaggaacaactcaacaagcgcgtagggcacgtctacaagaaagcatttatgcaagttgtcgaggctgacatgctctctaagggtctactcggtggcgaggcgtggtcttcgtggcataaggaagactctattcatgtaggagtacgctgcatcgagatgctcattgagtcaaccggaatggttagcttacaccgccaaaatgctggcgtagtaggtaaagactctgagactatcgaactcgcacctgaatacgctgaggctattgcaacccgtgcaggtgcgctggctggcatctctccgatgttccaaccttgcgtagttcctcctaagccgtggactggcattactggtggtggctattgggctaacggtcgtcgtcctctggcgctggtgcgtactcacagtaagaaaggtctgatgcgctacgaagacgtttacatgcctgaggtgtacaaagcgattaacattgcgcaaaacaccgcctggtcgatcaacaagtgggtcctggcggtcgccaacgtaatcaccaagtggaagcattgtccggtcgaggacatccctgcgattgagcgtgaagaactcccgatgaaaccggaagacatcgacatgaatcctgaggctctcaccgcgtggaaacgtgctagggctgctgtgtaccgcaaggacaaggctcgcaagtctcgccgtatcttgcttgagttcatgcttgagcaagccaataagtttgctaaccataaggccatctggttcccttacaacatggactggcgcggtcgtgtttacgctgtgtcaatgttcaacccgcaaggtaacgatatgaccaaaggactgcttacgctggcgaaaggtaaaccaatcggtaaggaaggttactactggctgaaaatccacggtgcaaactgtgcgggtgtcgataaggttccgttccctgagcgcatcaagttcattgaggaaaaccacgagaacatcatggcttgcgctaagtctccactggagaacacttggtgggctgagcaagatagtccgttctgcttccttgcgttctgctttgagtacgctggggtacagcaccacggcctgagctataactgctcccttccgctggcgtttgacgggtcttgctctggcatccagcacttctccgcgatgctccgagatgaggtaggtggtcgcgcggttaacttgcttcctagtgaaaccgttcaggacatctacgggattgttgctaagaaagtcaacgagattctacaagcagacgcaatcaatgggaccgataacgaagtagttaccgtgaccgatgagaacgaaggtgaaatctctgagaaagtcaagctgggcactaaggcactggctggtcaatggctggcatacggtgttactcgcagtgtgactaagcgttcagtcatgacgctggcttacgggtccaaagagttcggcttccgtcaacaagtgctgcgctggactattcagccagctattgattccggcaagggtctgatgttcactcagccgaatcaggctgctggatacatggctaagctgatttgggaatctgtgagcgtgacggtggtagctgcggttgaagcaatgaactggcttaagtctgctgctaagctgctggctgctgaggtcaaagataagaagactggagagattcttcgcaagcgttgcgctgtgcattgggtaactcctgatggtttccctgtgtggcaggaatacaagaagcctattcagacgcgcttgaacctgatgttcctcggtcagttccgcttacagcctaccattaacaccaacaaagatagcgagattgatgcacataaacaggtgtctggtatcgctcctaactttgtacacagccaagacggtagccaccttcgtaagactgtagtgtgggcacacgagaagtacggaatcgaatcttttgcactgattcacgactccttcggtaccattccggctgacgctgcgaacctgttcaaagcagtgcgcgaaactatggttgacacatatgagtcttgtgatgtactggctgatttctacgaccagttcgctgaccagttgcacgagtctcaattggacaaaatgccagcacttccggctaaaggtaacttgaacctccgtgacatcttagagtcggacttcgcgttcgcg

SEQ ID NO: 744 - protein, 890 aa, synthetic construct
  REGION 1..890: note = Variant of RNA polymerase
MHHHHHHMNTINIAKNDFSDIELAAIPFNTLVDHYGEGLAREQLALEHESYEMGETRFRKMFERQLKAGEVADNAAAKPLITTLLPKMIARINDWFEEVKAKRGKRPTAFQFLQEIKPEAVAYITIKTTLACLTSADRTTVQAVASAIGYAIEDEARFGRIRDLEAKHFLKNVEEQLNKRVGHVYKKAFMQVVEADMLSKGLLGGEAWSSWHKEDSIHVGVRCIEMLIESTGMVSLHRQNAGVVGKDSETIELAPEYAEAIATRAGALAGISPMFQPCVVPPKPWTGITGGGYWANGRRPLALVRTHSKKGLMRYEDVYMPEVYKAINIAQNTAWSINKWVLAVANVITKWKHCPVEDIPAIEREELPMKPEDIDMNPEALTAWKRARAAVYRKDKARKSRRILLEFMLEQANKFANHKAIWFPYNMDWRGRVYAVSMFNPQGNDMTKGLLTLAKGKPIGKEGYYWLKIHGANCAGVDKVPFPERIKFIEENHENIMACAKSPLENTWWAEQDSPFCFLAFCFEYAGVQHHGLSYNCSLPLAFDGSCSGIQHFSAMLRDEVGGRAVNLLPSETVQDIYGIVAKKVNEILQADAINGTDNEVVTVTDENEGEISEKVKLGTKALAGQWLAYGVTRSVTKRSVMTLAYGSKEFGFRQQVLRWTIQPAIDSGKGLMFTQPNQAAGYMAKLIWESVSVTVVAAVEAMNWLKSAAKLLAAEVKDKKTGEILRKRCAVHWVTPDGFPVWQEYKKPIQTRLNLMFLGQFRLQPTINTNKDSEIDAHKQVSGIAPNFVHSQDGSHLRKTVVWAHEKYGIESFALIHDSFGTIPADAANLFKAVRETMVDTYESCDVLADFYDQFADQLHESQLDKMPALPAKGNLNLRDILESDFAFA

SEQ ID NO: 745 - DNA, 2670 bp, synthetic construct
  misc_feature 1..2670: note = Variant of RNA polymerase
  source 1..2670: mol_type = other DNA
atgcaccatcaccatcaccatatgaacacgattaacatcgctaagaacgacttctctgacatcgaactggctgctatcccgttcaacactctggtcgaccattacggtgagggtttagctcgcgaacagttggcccttgagcatgagtcttacgaaatgggtgaaactcgtttccgcaagatgtttgagcgtcaacttaaagctggtgaggttgcggataacgctgccgccaagcctctcatcactaccctactccctaagatgattgcacgcattaacgactggtttgaggaagtgaaagctaagcgcggcaagcgcccgacagccttccagttcctgcaagaaatcaagccggaagccgtagcgtacatcaccattaagaccactctggcttgcctaaccagtgcggaccgtacaaccgttcaggctgtagcaagcgcaatcggttatgccattgaggacgaggctcgcttcggtcgtatccgtgaccttgaagctaagcacttcctgaaaaacgttgaggaacaactcaacaagcgcgtagggcacgtctacaagaaagcatttatgcaagttgtcgaggctgacatgctctctaagggtctactcggtggcgaggcgtggtcttcgtggcataaggaagactctattcatgtaggagtacgctgcatcgagatgctcattgagtcaaccggaatggttagcttacaccgccaaaatgctggcgtagtaggtaaagactctgagactatcgaactcgcacctgaatacgctgaggctattgcaacccgtgcaggtgcgctggctggcatctctccgatgttccaaccttgcgtagttcctcctaagccgtggactggcattactggtggtggctattgggctaacggtcgtcgtcctctggcgctggtgcgtactcacagtaagaaaggtctgatgcgctacgaagacgtttacatgcctgaggtgtacaaagcgattaacattgcgcaaaacaccgcctggtcgatcaacaagtgggtcctggcggtcgccaacgtaatcaccaagtggaagcattgtccggtcgaggacatccctgcgattgagcgtgaagaactcccgatgaaaccggaagacatcgacatgaatcctgaggctctcaccgcgtggaaacgtgctaaagctgctgtgtaccgcaaggacaaggctcgcaagtctcgccgtatcttgcttgagttcatgcttgagcaagccaataagtttgctaaccataaggccatctggttcccttacaacatggactggcgcggtcgtgtttacgctgtgtcaatgttcaacccgcaaggtaacgatatgaccaaaggactgcttacgctggcgaaaggtaaaccaatcggtaaggaaggttactactggctgaaaatccacggtgcaaactgtgcgggtgtcgataaggttccgttccctgagcgcatcaagttcattgaggaaaaccacgagaacatcatggcttgcgctaagtctccactggagaacacttggtgggctgagcaagatagtccgttctgcttccttgcgttctgctttgagtacgctggggtacagcaccacggcctgagctataactgctcccttccgctggcgtttgacgggtcttgctctggcatccagcacttctccgcgatgctccgagatgaggtaggtggtcgcgcggttaacttgcttcctagtgaaaccgttcaggacatctacgggattgttgctaagaaagtcaacgagattctacaagcagacgcaatcaatgggaccgataacgaagtagttaccgtgaccgatgagaacgaaggtgaaatctctgagaaagtcaagctgggcactaaggcactggctggtcaatggctggcatacggtgttactcgcagtgtgactaagcgttcagtcatgacgctggcttacgggtccaaagagttcggcttccgtcaacaagtgctgcgctggactattcagccagctattgattccggcaagggtctgatgttcactcagccgaatcaggctgctggatacatggctaagctgatttgggaatctgtgcgggtgacggtggtagctgcggttgaagcaatgaactggcttaagtctgctgctaagctgctggctgctgaggtcaaagataagaagactggagagattcttcgcaagcgttgcgctgtgcattgggtaactcctgatggtttccctgtgtggcaggaatacaagaagcctattcagacgcgcttgaacctgatgttcctcggtcagttccgcttacagcctaccattaacaccaacaaagatagcgagattgatgcacataaacaggtgtctggtatcgctcctaactttgtacacagccaagacggtagccaccttcgtaagactgtagtgtgggcacacgagaagtacggaatcgaatcttttgcactgattcacgactccttcggtaccattccggctgacgctgcgaacctgttcaaagcagtgcgcgaaactatggttgacacatatgagtcttgtgatgtactggctgatttctacgaccagttcgctgaccagttgcacgagtctcaattggacaaaatgccagcacttccggctaaaggtaacttgaacctccgtgacatcttagagtcggacttcgcgttcgcg

SEQ ID NO: 746 - protein, 890 aa, synthetic construct
  REGION 1..890: note = Variant of RNA polymerase
MHHHHHHMNTINIAKNDFSDIELAAIPFNTLVDHYGEGLAREQLALEHESYEMGETRFRKMFERQLKAGEVADNAAAKPLITTLLPKMIARINDWFEEVKAKRGKRPTAFQFLQEIKPEAVAYITIKTTLACLTSADRTTVQAVASAIGYAIEDEARFGRIRDLEAKHFLKNVEEQLNKRVGHVYKKAFMQVVEADMLSKGLLGGEAWSSWHKEDSIHVGVRCIEMLIESTGMVSLHRQNAGVVGKDSETIELAPEYAEAIATRAGALAGISPMFQPCVVPPKPWTGITGGGYWANGRRPLALVRTHSKKGLMRYEDVYMPEVYKAINIAQNTAWSINKWVLAVANVITKWKHCPVEDIPAIEREELPMKPEDIDMNPEALTAWKRAKAAVYRKDKARKSRRILLEFMLEQANKFANHKAIWFPYNMDWRGRVYAVSMFNPQGNDMTKGLLTLAKGKPIGKEGYYWLKIHGANCAGVDKVPFPERIKFIEENHENIMACAKSPLENTWWAEQDSPFCFLAFCFEYAGVQHHGLSYNCSLPLAFDGSCSGIQHFSAMLRDEVGGRAVNLLPSETVQDIYGIVAKKVNEILQADAINGTDNEVVTVTDENEGEISEKVKLGTKALAGQWLAYGVTRSVTKRSVMTLAYGSKEFGFRQQVLRWTIQPAIDSGKGLMFTQPNQAAGYMAKLIWESVRVTVVAAVEAMNWLKSAAKLLAAEVKDKKTGEILRKRCAVHWVTPDGFPVWQEYKKPIQTRLNLMFLGQFRLQPTINTNKDSEIDAHKQVSGIAPNFVHSQDGSHLRKTVVWAHEKYGIESFALIHDSFGTIPADAANLFKAVRETMVDTYESCDVLADFYDQFADQLHESQLDKMPALPAKGNLNLRDILESDFAFA

SEQ ID NO: 747 - DNA, 2670 bp, synthetic construct
  misc_feature 1..2670: note = Variant of RNA polymerase
  source 1..2670: mol_type = other DNA
atgcaccatcaccatcaccatatgaacacgattaacatcgctaagaacgacttctctgacatcgaactggctgctatcccgttcaacactctggtcgaccattacggtgagggtttagctcgcgaacagttggcccttgagcatgagtcttacgaaatgggtgaaactcgtttccgcaagatgtttgagcgtcaacttaaagctggtgaggttgcggataacgctgccgccaagcctctcatcactaccctactccctaagatgattgcacgcattaacgactggtttgaggaagtgaaagctaagcgcggcaagcgcccgacagccttccagttcctgcaagaaatcaagccggaagccgtagcgtacatcaccattaagaccactctggcttgcctaaccagtgcggaccgtacaaccgttcaggctgtagcaagcgcaatcggttatgccattgaggacgaggctcgcttcggtcgtatccgtgaccttgaagctaagcacttcctgaaaaacgttgaggaacaactcaacaagcgcgtagggcacgtctacaagaaagcatttatgcaagttgtcgaggctgacatgctctctaagggtctactcggtggcgaggcgtggtcttcgtggcataaggaagactctattcatgtaggagtacgctgcatcgagatgctcattgagtcaaccggaatggttagcttacaccgccaaaatgctggcgtagtaggtaaagactctgagactatcgaactcgcacctgaatacgctgaggctattgcaacccgtgcaggtgcgctggctggcatctctccgatgttccaaccttgcgtagttcctcctaagccgtggactggcattactggtggtggctattgggctaacggtcgtcgtcctctggcgctggtgcgtactcacagtaagaaaggtctgatgcgctacgaagacgtttacatgcctgaggtgtacaaagcgattaacattgcgcaaaacaccgcctggtcgatcaacaagtgggtcctggcggtcgccaacgtaatcaccaagtggaagcattgtccggtcgaggacatccctgcgattgagcgtgaagaactcccgatgaaaccggaagacatcgacatgaatcctgaggctctcaccgcgtggaaacgtgctaaagctgctgtgtaccgcaaggacaaggctcgcaagtctcgccgtatcttgcttgagttcatgcttgagcaagccaataagtttgctaaccataaggccatctggttcccttacaacatggactggcgcggtcgtgtttacgctgtgtcaatgttcaacccgcaaggtaacgatatgaccaaaggactgcttacgctggcgaaaggtaaaccaatcggtaaggaaggttactactggctgaaaatccacggtgcaaactgtgcgggtgtcgataaggttccgttccctgagcgcatcaagttcattgaggaaaaccacgagaacatcatggcttgcgctaagtctccactggagaacacttggtgggctgagcaagatagtccgttctgcttccttgcgttctgctttgagtacgctggggtacagcaccacggcctgagctataactgctcccttccgctggcgtttgacgggtcttgctctggcatccagcacttctccgcgatgctccgagatgaggtaggtggtcgcgcggttaacttgcttcctagtgaaaccgttcaggacatctacgggattgttgctaagaaagtcaacgagattctacaagcagacgcaatcaatgggaccgataacgaagtagttaccgtgaccgatgagaacgaaggtgaaatctctgagaaagtcaagctgggcactaaggcactggctggtcaatggctggcatacggtgttactcgcagtgtgactaagcgttcagtcatgacgctggcttacgggtccaaagagttcggcttccgtcaacaagtgctgcgctggactattcagccagctattgattccggcaagggttctatgttcactcagccgaatcaggctgctggatacatggctaagctgatttgggaatctgtgagcgtgacggtggtagctgcggttgaagcaatgaactggcttaagtctgctgctaagctgctggctgctgaggtcaaagataagaagactggagagattcttcgcaagcgttgcgctgtgcattgggtaactcctgatggtttccctgtgtggcaggaatacaagaagcctattcagacgcgcttgaacctgatgttcctcggtcagttccgcttacagcctaccattaacaccaacaaagatagcgagattgatgcacataaacaggtgtctggtatcgctcctaactttgtacacagccaagacggtagccaccttcgtaagactgtagtgtgggcacacgagaagtacggaatcgaatcttttgcactgattcacgactccttcggtaccattccggctgacgctgcgaacctgttcaaagcagtgcgcgaaactatggttgacacatatgagtcttgtgatgtactggctgatttctacgaccagttcgctgaccagttgcacgagtctcaattggacaaaatgccagcacttccggctaaaggtaacttgaacctccgtgacatcttagagtcggacttcgcgttcgcg

SEQ ID NO: 748 - protein, 890 aa, synthetic construct
  REGION 1..890: note = Variant of RNA polymerase
MHHHHHHMNTINIAKNDFSDIELAAIPFNTLVDHYGEGLAREQLALEHESYEMGETRFRKMFERQLKAGEVADNAAAKPLITTLLPKMIARINDWFEEVKAKRGKRPTAFQFLQEIKPEAVAYITIKTTLACLTSADRTTVQAVASAIGYAIEDEARFGRIRDLEAKHFLKNVEEQLNKRVGHVYKKAFMQVVEADMLSKGLLGGEAWSSWHKEDSIHVGVRCIEMLIESTGMVSLHRQNAGVVGKDSETIELAPEYAEAIATRAGALAGISPMFQPCVVPPKPWTGITGGGYWANGRRPLALVRTHSKKGLMRYEDVYMPEVYKAINIAQNTAWSINKWVLAVANVITKWKHCPVEDIPAIEREELPMKPEDIDMNPEALTAWKRAKAAVYRKDKARKSRRILLEFMLEQANKFANHKAIWFPYNMDWRGRVYAVSMFNPQGNDMTKGLLTLAKGKPIGKEGYYWLKIHGANCAGVDKVPFPERIKFIEENHENIMACAKSPLENTWWAEQDSPFCFLAFCFEYAGVQHHGLSYNCSLPLAFDGSCSGIQHFSAMLRDEVGGRAVNLLPSETVQDIYGIVAKKVNEILQADAINGTDNEVVTVTDENEGEISEKVKLGTKALAGQWLAYGVTRSVTKRSVMTLAYGSKEFGFRQQVLRWTIQPAIDSGKGSMFTQPNQAAGYMAKLIWESVSVTVVAAVEAMNWLKSAAKLLAAEVKDKKTGEILRKRCAVHWVTPDGFPVWQEYKKPIQTRLNLMFLGQFRLQPTINTNKDSEIDAHKQVSGIAPNFVHSQDGSHLRKTVVWAHEKYGIESFALIHDSFGTIPADAANLFKAVRETMVDTYESCDVLADFYDQFADQLHESQLDKMPALPAKGNLNLRDILESDFAFA

SEQ ID NO: 749 - DNA, 2670 bp, synthetic construct
  misc_feature 1..2670: note = Variant of RNA polymerase
  source 1..2670: mol_type = other DNA
atgcaccatcaccatcaccatatgaacacgattaacatcgctaagaacgacttctctgacatcgaactggctgctatcccgttcaacactctggtcgaccattacggtgagggtttagctcgcgaacagttggcccttgagcatgagtcttacgaaatgggtgaaactcgtttccgcaagatgtttgagcgtcaacttaaagctggtgaggttgcggataacgctgccgccaagcctctcatcactaccctactccctaagatgattgcacgcattaacgactggtttgaggaagtgaaagctaagcgcggcaagcgcccgacagccttccagttcctgcaagaaatcaagccggaagccgtagcgtacatcaccattaagaccactctggcttgcctaaccagtgcggaccgtacaaccgttcaggctgtagcaagcgcaatcggttatgccattgaggacgaggctcgcttcggtcgtatccgtgaccttgaagctaagcacttcctgaaaaacgttgaggaacaactcaacaagcgcgtagggcacgtctacaagaaagcatttatgcaagttgtcgaggctgacatgctctctaagggtctactcggtggcgaggcgtggtcttcgtggcataaggaagactctattcatgtaggagtacgctgcatcgagatgctcattgagtcaaccggaatggttagcttacaccgccaaaatgctggcgtagtaggtaaagactctgagactatcgaactcgcacctgaatacgctgaggctattgcaacccgtgcaggtgcgctggctggcatctctccgatgttccaaccttgcgtagttcctcctaagccgtggactggcattactggtggtggctattgggctaacggtcgtcgtcctctggcgctggtgcgtactcacagtaagaaaggtctgatgcgctacgaagacgtttacatgcctgaggtgtacaaagcgattaacattgcgcaaaacaccgcctggtcgatcaacaagtgggtcctggcggtcgccaacgtaatcaccaagtggaagcattgtccggtcgaggacatccctgcgattgagcgtgaagaactcccgatgaaaccggaagacatcgacatgaatcctgaggctctcaccgcgtggaaacgtgctaaagctgctgtgtaccgcaaggacaagtctcgcaagtctcgccgtatcttgcttgagttcatgcttgagcaagccaataagtttgctaaccataaggccatctggttcccttacaacatggactggcgcggtcgtgtttacgctgtgtcaatgttcaacccgcaaggtaacgatatgaccaaaggactgcttacgctggcgaaaggtaaaccaatcggtaaggaaggttactactggctgaaaatccacggtgcaaactgtgcgggtgtcgataaggttccgttccctgagcgcatcaagttcattgaggaaaaccacgagaacatcatggcttgcgctaagtctccactggagaacacttggtgggctgagcaagatagtccgttctgcttccttgcgttctgctttgagtacgctggggtacagcaccacggcctgagctataactgctcccttccgctggcgtttgacgggtcttgctctggcatccagcacttctccgcgatgctccgagatgaggtaggtggtcgcgcggttaacttgcttcctagtgaaaccgttcaggacatctacgggattgttgctaagaaagtcaacgagattctacaagcagacgcaatcaatgggaccgataacgaagtagttaccgtgaccgatgagaacgaaggtgaaatctctgagaaagtcaagctgggcactaaggcactggctggtcaatggctggcatacggtgttactcgcagtgtgactaagcgttcagtcatgacgctggcttacgggtccaaagagttcggcttccgtcaacaagtgctgcgctggactattcagccagctattgattccggcaagggtctgatgttcactcagccgaatcaggctgctggatacatggctaagctgatttgggaatctgtgagcgtgacggtggtagctgcggttgaagcaatgaactggcttaagtctgctgctaagctgctggctgctgaggtcaaagataagaagactggagagattcttcgcaagcgttgcgctgtgcattgggtaactcctgatggtttccctgtgtggcaggaatacaagaagcctattcagacgcgcttgaacctgatgttcctcggtcagttccgcttacagcctaccattaacaccaacaaagatagcgagattgatgcacataaacaggtgtctggtatcgctcctaactttgtacacagccaagacggtagccaccttcgtaagactgtagtgtgggcacacgagaagtacggaatcgaatcttttgcactgattcacgactccttcggtaccattccggctgacgctgcgaacctgttcaaagcagtgcgcgaaactatggttgacacatatgagtcttgtgatgtactggctgatttctacgaccagttcgctgaccagttgcacgagtctcaattggacaaaatgccagcacttccggctaaaggtaacttgaacctccgtgacatcttagagtcggacttcgcgttcgcg

SEQ ID NO: 750 - protein, 890 aa, synthetic construct
  REGION 1..890: note = Variant of RNA polymerase
MHHHHHHMNTINIAKNDFSDIELAAIPFNTLVDHYGEGLAREQLALEHESYEMGETRFRKMFERQLKAGEVADNAAAKPLITTLLPKMIARINDWFEEVKAKRGKRPTAFQFLQEIKPEAVAYITIKTTLACLTSADRTTVQAVASAIGYAIEDEARFGRIRDLEAKHFLKNVEEQLNKRVGHVYKKAFMQVVEADMLSKGLLGGEAWSSWHKEDSIHVGVRCIEMLIESTGMVSLHRQNAGVVGKDSETIELAPEYAEAIATRAGALAGISPMFQPCVVPPKPWTGITGGGYWANGRRPLALVRTHSKKGLMRYEDVYMPEVYKAINIAQNTAWSINKWVLAVANVITKWKHCPVEDIPAIEREELPMKPEDIDMNPEALTAWKRAKAAVYRKDKSRKSRRILLEFMLEQANKFANHKAIWFPYNMDWRGRVYAVSMFNPQGNDMTKGLLTLAKGKPIGKEGYYWLKIHGANCAGVDKVPFPERIKFIEENHENIMACAKSPLENTWWAEQDSPFCFLAFCFEYAGVQHHGLSYNCSLPLAFDGSCSGIQHFSAMLRDEVGGRAVNLLPSETVQDIYGIVAKKVNEILQADAINGTDNEVVTVTDENEGEISEKVKLGTKALAGQWLAYGVTRSVTKRSVMTLAYGSKEFGFRQQVLRWTIQPAIDSGKGLMFTQPNQAAGYMAKLIWESVSVTVVAAVEAMNWLKSAAKLLAAEVKDKKTGEILRKRCAVHWVTPDGFPVWQEYKKPIQTRLNLMFLGQFRLQPTINTNKDSEIDAHKQVSGIAPNFVHSQDGSHLRKTVVWAHEKYGIESFALIHDSFGTIPADAANLFKAVRETMVDTYESCDVLADFYDQFADQLHESQLDKMPALPAKGNLNLRDILESDFAFA

SEQ ID NO: 751 - DNA, 2670 bp, synthetic construct
  misc_feature 1..2670: note = Variant of RNA polymerase
  source 1..2670: mol_type = other DNA
atgcaccatcaccatcaccatatgaacacgattaacatcgctaagaacgacttctctgacatcgaactggctgctatcccgttcaacactctggtcgaccattacggtgagggtttagctcgcgaacagttggcccttgagcatgagtcttacgaaatgggtgaaactcgtttccgcaagatgtttgagcgtcaacttaaagctggtgaggttgcggataacgctgccgccaagcctctcatcactaccctactccctaagatgattgcacgcattaacgactggtttgaggaagtgaaagctaagcgcggcaagcgcccgacagccttccagttcctgcaagaaatcaagccggaagccgtagcgtacatcaccattaagaccactctggcttgcctaaccagtgcggaccgtacaaccgttcaggctgtagcaagcgcaatcggttatgccattgaggacgaggctcgcttcggtcgtatccgtgaccttgaagctaagcacttcctgaaaaacgttgaggaacaactcaacaagcgcgtagggcacgtctacaagaaagcatttatgcaagttgtcgaggctgacatgctctctaagggtctactcggtggcgaggcgtggtcttcgtggcataaggaagactctattcatgtaggagtacgctgcatcgagatgctcattgagtcaaccggaatggttagcttacaccgccaaaatgctggcgtagtaggtaaagactctgagactatcgaactcgcacctgaatacgctgaggctattgcaacccgtgcaggtgcgctggctggcatctctccgatgttccaaccttgcgtagttcctcctaagccgtggactggcattactggtggtggctattgggctaacggtcgtcgtcctctggcgctggtgcgtactcacagtaagaaaggtctgatgcgctacgaagacgtttacatgcctgaggtgtacaaagcgattaacattgcgcaaaacaccgcctggtcgatcaacaagtgggtcctggcggtcgccaacgtaatcaccaagtggaagcattgtccggtcgaggacatccctgcgattgagcgtgaagaactcccgatgaaaccggaagacatcccgatgaatcctgaggctctcaccgcgtggaaacgtgctaaagctgctgtgtaccgcaaggacaaggctcgcaagtctcgccgtatcttgcttgagttcatgcttgagcaagccaataagtttgctaaccataaggccatctggttcccttacaacatggactggcgcggtcgtgtttacgctgtgtcaatgttcaacccgcaaggtaacgatatgaccaaaggactgcttacgctggcgaaaggtaaaccaatcggtaaggaaggttactactggctgaaaatccacggtgcaaactgtgcgggtgtcgataaggttccgttccctgagcgcatcaagttcattgaggaaaaccacgagaacatcatggcttgcgctaagtctccactggagaacacttggtgggctgagcaagatagtccgttctgcttccttgcgttctgctttgagtacgctggggtacagcaccacggcctgagctataactgctcccttccgctggcgtttgacgggtcttgctctggcatccagcacttctccgcgatgctccgagatgaggtaggtggtcgcgcggttaacttgcttcctagtgaaaccgttcaggacatctacgggattgttgctaagaaagtcaacgagattctacaagcagacgcaatcaatgggaccgataacgaagtagttaccgtgaccgatgagaacgaaggtgaaatctctgagaaagtcaagctgggcactaaggcactggctggtcaatggctggcatacggtgttactcgcagtgtgactaagcgttcagtcatgacgctggcttacgggtccaaagagttcggcttccgtcaacaagtgctgcgctggactattcagccagctattgattccggcaagggtctgatgttcactcagccgaatcaggctgctggatacatggctaagctgatttgggaatctgtgagcgtgacggtggtagctgcggttgaagcaatgaactggcttaagtctgctgctaagctgctggctgctgaggtcaaagataagaagactggagagattcttcgcaagcgttgcgctgtgcattgggtaactcctgatggtttccctgtgtggcaggaatacaagaagcctattcagacgcgcttgaacctgatgttcctcggtcagttccgcttacagcctaccattaacaccaacaaagatagcgagattgatgcacataaacaggtgtctggtatcgctcctaactttgtacacagccaagacggtagccaccttcgtaagactgtagtgtgggcacacgagaagtacggaatcgaatcttttgcactgattcacgactccttcggtaccattccggctgacgctgcgaacctgttcaaagcagtgcgcgaaactatggttgacacatatgagtcttgtgatgtactggctgatttctacgaccagttcgctgaccagttgcacgagtctcaattggacaaaatgccagcacttccggctaaaggtaacttgaacctccgtgacatcttagagtcggacttcgcgttcgcg

SEQ ID NO: 752 - protein, 890 aa, synthetic construct
  REGION 1..890: note = Variant of RNA polymerase
MHHHHHHMNTINIAKNDFSDIELAAIPFNTLVDHYGEGLAREQLALEHESYEMGETRFRKMFERQLKAGEVADNAAAKPLITTLLPKMIARINDWFEEVKAKRGKRPTAFQFLQEIKPEAVAYITIKTTLACLTSADRTTVQAVASAIGYAIEDEARFGRIRDLEAKHFLKNVEEQLNKRVGHVYKKAFMQVVEADMLSKGLLGGEAWSSWHKEDSIHVGVRCIEMLIESTGMVSLHRQNAGVVGKDSETIELAPEYAEAIATRAGALAGISPMFQPCVVPPKPWTGITGGGYWANGRRPLALVRTHSKKGLMRYEDVYMPEVYKAINIAQNTAWSINKWVLAVANVITKWKHCPVEDIPAIEREELPMKPEDIPMNPEALTAWKRAKAAVYRKDKARKSRRILLEFMLEQANKFANHKAIWFPYNMDWRGRVYAVSMFNPQGNDMTKGLLTLAKGKPIGKEGYYWLKIHGANCAGVDKVPFPERIKFIEENHENIMACAKSPLENTWWAEQDSPFCFLAFCFEYAGVQHHGLSYNCSLPLAFDGSCSGIQHFSAMLRDEVGGRAVNLLPSETVQDIYGIVAKKVNEILQADAINGTDNEVVTVTDENEGEISEKVKLGTKALAGQWLAYGVTRSVTKRSVMTLAYGSKEFGFRQQVLRWTIQPAIDSGKGLMFTQPNQAAGYMAKLIWESVSVTVVAAVEAMNWLKSAAKLLAAEVKDKKTGEILRKRCAVHWVTPDGFPVWQEYKKPIQTRLNLMFLGQFRLQPTINTNKDSEIDAHKQVSGIAPNFVHSQDGSHLRKTVVWAHEKYGIESFALIHDSFGTIPADAANLFKAVRETMVDTYESCDVLADFYDQFADQLHESQLDKMPALPAKGNLNLRDILESDFAFA

SEQ ID NO: 753 - DNA, 2670 bp, synthetic construct
  misc_feature 1..2670: note = Variant of RNA polymerase
  source 1..2670: mol_type = other DNA
atgcaccatcaccatcaccatatgaacacgattaacatcgctaagaacgacttctctgacatcgaactggctgctatcccgttcaacactctggtcgaccattacggtgagggtttagctcgcgaacagttggcccttgagcatgagtcttacgaaatgggtgaaactcgtttccgcaagatgtttgagcgtcaacttaaagctggtgaggttgcggataacgctgccgccaagcctctcatcactaccctactccctaagatgattgcacgcattaacgactggtttgaggaagtgaaagctaagcgcggcaagcgcccgacagccttccagttcctgcaagaaatcaagccggaagccgtagcgtacatcaccattaagaccactctggcttgcctaaccagtgcggaccgtacaaccgttcaggctgtagcaagcgcaatcggttatgccattgaggacgaggctcgcttcggtcgtatccgtgaccttgaagctaagcacttcctgaaaaacgttgaggaacaactcaacaagcgcgtagggcacgtctacaagaaagcatttatgcaagttgtcgaggctgacatgctctctaagggtctactcggtggcgaggcgtggtcttcgtggcataaggaagactctattcatgtaggagtacgctgcatcgagatgctcattgagtcaaccggaatggttagcttacaccgccaaaatgctggcgtagtaggtaaagactctgagactatcgaactcgcacctgaatacgctgaggctattgcaacccgtgcaggtgcgctggctggcatctctccgatgttccaaccttgcgtagttcctcctaagccgtggactggcattactggtggtggctattgggctaacggtcgtcgtcctctggcgctggtgcgtactcacagtaagaaaggtctgatgcgctacgaagacgtttacatgcctgaggtgtacaaagcgattaacattgcgcaaaacaccgcctggtcgatcaacaagtgggtcctggcggtcgccaacgtaatcaccaagtggaagcattgtccggtcgaggacatccctgcgattgagcgtgaagaactcccgatgaaaccggaagacatcgacatgaatcctgaggctctcaccgcgtggaaacgtgctaaagctgctgtgtaccgcaaggacaaggctcgcaagtctcgccgtatcttgcttgagttcatgcttgagcaagccaataagtttgctaaccataaggccatctggttcccttacaacatggactggcgcggtcgtgtttacgctgtgtcaatgttcaacccgcaaggtaacgatatgaccaaaggactgcttacgctggcgaaaggtaaaccaatcggtaaggaaggttactactggctgaaaatccacggtgcaaactgtgcgggtgtcgataaggttccgttccctgagcgcatcaagttcattgaggaaaaccacgagaacatcatggcttgcgctaagtctccactggagaacacttggtgggctgagcaagatagtccgttctgcttccttgcgttctgctttgagtacgctggggtacagcaccacggcctgagctataactgctcccttccgctggcgtttgacgggtcttgctctggcatccagcacttctccgcgatgctccgagatgaggtaggtggtcgcgcggttaacttgcttcctagtgaaaccgttcaggacatctacgggattgttgctaagaaagtcaacgagattctacaagcagacgcaatcaatgggaccgataacgaagtagttaccgtgaccgatgagaacgaaggtgaaatctctgagaaagtcaagctgggcactaaggcactggctggtcaatggctggcatacggtgttactcgcagtgtgactaagcgttcagtcatgacgctggcttacgggtccaaagagttcggcttccgtcaacaagtgctgcgctggactattcagccagctattgattccggcaagggtggtatgttcactcagccgaatcaggctgctggatacatggctaagctgatttgggaatctgtgagcgtgacggtggtagctgcggttgaagcaatgaactggcttaagtctgctgctaagctgctggctgctgaggtcaaagataagaagactggagagattcttcgcaagcgttgcgctgtgcattgggtaactcctgatggtttccctgtgtggcaggaatacaagaagcctattcagacgcgcttgaacctgatgttcctcggtcagttccgcttacagcctaccattaacaccaacaaagatagcgagattgatgcacataaacaggtgtctggtatcgctcctaactttgtacacagccaagacggtagccaccttcgtaagactgtagtgtgggcacacgagaagtacggaatcgaatcttttgcactgattcacgactccttcggtaccattccggctgacgctgcgaacctgttcaaagcagtgcgcgaaactatggttgacacatatgagtcttgtgatgtactggctgatttctacgaccagttcgctgaccagttgcacgagtctcaattggacaaaatgccagcacttccggctaaaggtaacttgaacctccgtgacatcttagagtcggacttcgcgttcgcg

SEQ ID NO: 754 - protein, 890 aa, synthetic construct
  REGION 1..890: note = Variant of RNA polymerase
MHHHHHHMNTINIAKNDFSDIELAAIPFNTLVDHYGEGLAREQLALEHESYEMGETRFRKMFERQLKAGEVADNAAAKPLITTLLPKMIARINDWFEEVKAKRGKRPTAFQFLQEIKPEAVAYITIKTTLACLTSADRTTVQAVASAIGYAIEDEARFGRIRDLEAKHFLKNVEEQLNKRVGHVYKKAFMQVVEADMLSKGLLGGEAWSSWHKEDSIHVGVRCIEMLIESTGMVSLHRQNAGVVGKDSETIELAPEYAEAIATRAGALAGISPMFQPCVVPPKPWTGITGGGYWANGRRPLALVRTHSKKGLMRYEDVYMPEVYKAINIAQNTAWSINKWVLAVANVITKWKHCPVEDIPAIEREELPMKPEDIDMNPEALTAWKRAKAAVYRKDKARKSRRILLEFMLEQANKFANHKAIWFPYNMDWRGRVYAVSMFNPQGNDMTKGLLTLAKGKPIGKEGYYWLKIHGANCAGVDKVPFPERIKFIEENHENIMACAKSPLENTWWAEQDSPFCFLAFCFEYAGVQHHGLSYNCSLPLAFDGSCSGIQHFSAMLRDEVGGRAVNLLPSETVQDIYGIVAKKVNEILQADAINGTDNEVVTVTDENEGEISEKVKLGTKALAGQWLAYGVTRSVTKRSVMTLAYGSKEFGFRQQVLRWTIQPAIDSGKGGMFTQPNQAAGYMAKLIWESVSVTVVAAVEAMNWLKSAAKLLAAEVKDKKTGEILRKRCAVHWVTPDGFPVWQEYKKPIQTRLNLMFLGQFRLQPTINTNKDSEIDAHKQVSGIAPNFVHSQDGSHLRKTVVWAHEKYGIESFALIHDSFGTIPADAANLFKAVRETMVDTYESCDVLADFYDQFADQLHESQLDKMPALPAKGNLNLRDILESDFAFA

SEQ ID NO: 755 - DNA, 2670 bp, synthetic construct
  misc_feature 1..2670: note = Variant of RNA polymerase
  source 1..2670: mol_type = other DNA
atgcaccatcaccatcaccatatgaacacgattaacatcgctaagaacgacttctctgacatcgaactggctgctatcccgttcaacactctggtcgaccattacggtgagggtttagctcgcgaacagttggcccttgagcatgagtcttacgaaatgggtgaaactcgtttccgcaagatgtttgagcgtcaacttaaagctggtgaggttgcggataacgctgccgccaagcctctcatcactaccctactccctaagatgattgcacgcattaacgactggtttgaggaagtgaaagctaagcgcggcaagcgcccgacagccttccagttcctgcaagaaatcaagccggaagccgtagcgtacatcaccattaagaccactctggcttgcctaaccagtgcgggccgtacaaccgttcaggctgtagcaagcgcaatcggttatgccattgaggacgaggctcgcttcggtcgtatccgtgaccttgaagctaagcacttcctgaaaaacgttgaggaacaactcaacaagcgcgtagggcacgtctacaagaaagcatttatgcaagttgtcgaggctgacatgctctctaagggtctactcggtggcgaggcgtggtcttcgtggcataaggaagactctattcatgtaggagtacgctgcatcgagatgctcattgagtcaaccggaatggttagcttacaccgccaaaatgctggcgtagtaggtaaagactctgagactatcgaactcgcacctgaatacgctgaggctattgcaacccgtgcaggtgcgctggctggcatctctccgatgttccaaccttgcgtagttcctcctaagccgtggactggcattactggtggtggctattgggctaacggtcgtcgtcctctggcgctggtgcgtactcacagtaagaaaggtctgatgcgctacgaagacgtttacatgcctgaggtgtacaaagcgattaacattgcgcaaaacaccgcctggtcgatcaacaagtgggtcctggcggtcgccaacgtaatcaccaagtggaagcattgtccggtcgaggacatccctgcgattgagcgtgaagaactcccgatgaaaccggaagacatcgacatgaatcctgaggctctccgtgcgtggaaacgtgctaaagctgctgtgtaccgcaaggacaaggctcgcaagtctcgccgtatcttgcttgagttcatgcttgagcaagccaataagtttgctaaccataaggccatctggttcccttacaacatggactggcgcggtcgtgtttacgctgtgtcaatgttcaacccgcaaggtaacgatatgaccaaaggactgcttacgctggcgaaaggtaaaccaatcggtaaggaaggttactactggctgaaaatccacggtgcaaactgtgcgggtgtcgataaggttccgttccctgagcgcatcaagttcattgaggaaaaccacgagaacatcatggcttgcgctaagtctccactggagaacacttggtgggctgagcaagatagtccgttctgcttccttgcgttctgctttgagtacgctggggtacagcaccacggcctgagctataactgctcccttccgctggcgtttgacgggtcttgctctggcatccagcacttctccgcgatgctccgagatgaggtaggtggtcgcgcggttaacttgcttcctagtgaaaccgttcaggacatctacgggattgttgctaagaaagtcaacgagattctacaagcagacgcaatcaatgggaccgataacgaagtagttaccgtgaccgatgagaacgaaggtgaaatctctgagaaagtcaagctgggcactaaggcactggctggtcaatggctggcatacggtgttactcgcagtgtgactaagcgttcagtcatgacgctggcttacgggtccaaagagttcggcttccgtcagcaagtgctgcgctggactattcagccagctattgattccggcaagggtctgatgttcactcagccgaatcaggctgctggatacatggctaagctgatttgggaatctgtgagcgtgacggtggtagctgcggttgaagcaatgaactggcttaagtctgctgctaagctgctggctgctgaggtcaaagataagaagactggagagattcttcgcaagcgttgcgctgtgcattgggtaactcctgatggtttccctgtgtggcaggaatacaagaagcctattcagacgcgcttgaacctgatgttcctcggtcagttccgcttacagcctaccattaacaccaacaaagatagcgagattgatgcacataaacaggagtctggtatcgctcctaactttgtacacagccaagacggtagccaccttcgtaagactgtagtgtgggcacacgagaagtacggaatcgaatcttttgcactgattcacgactccttcggtaccattccggctgacgctgcgaacctgttcaaagcagtgcgcgaaactatggttgacacatatgagtcttgtgatgtactggctgatttctacgaccagttcgctgaccagttgcacgagtctcaattggacaaaatgccagcacttccggctaaaggtaacttgaacctccgtgacatcttagagtcggacttcgcgttcgcg

SEQ ID NO: 756 - protein, 890 aa, synthetic construct
  REGION 1..890: note = Variant of RNA polymerase
MHHHHHHMNTINIAKNDFSDIELAAIPFNTLVDHYGEGLAREQLALEHESYEMGETRFRKMFERQLKAGEVADNAAAKPLITTLLPKMIARINDWFEEVKAKRGKRPTAFQFLQEIKPEAVAYITIKTTLACLTSAGRTTVQAVASAIGYAIEDEARFGRIRDLEAKHFLKNVEEQLNKRVGHVYKKAFMQVVEADMLSKGLLGGEAWSSWHKEDSIHVGVRCIEMLIESTGMVSLHRQNAGVVGKDSETIELAPEYAEAIATRAGALAGISPMFQPCVVPPKPWTGITGGGYWANGRRPLALVRTHSKKGLMRYEDVYMPEVYKAINIAQNTAWSINKWVLAVANVITKWKHCPVEDIPAIEREELPMKPEDIDMNPEALRAWKRAKAAVYRKDKARKSRRILLEFMLEQANKFANHKAIWFPYNMDWRGRVYAVSMFNPQGNDMTKGLLTLAKGKPIGKEGYYWLKIHGANCAGVDKVPFPERIKFIEENHENIMACAKSPLENTWWAEQDSPFCFLAFCFEYAGVQHHGLSYNCSLPLAFDGSCSGIQHFSAMLRDEVGGRAVNLLPSETVQDIYGIVAKKVNEILQADAINGTDNEVVTVTDENEGEISEKVKLGTKALAGQWLAYGVTRSVTKRSVMTLAYGSKEFGFRQQVLRWTIQPAIDSGKGLMFTQPNQAAGYMAKLIWESVSVTVVAAVEAMNWLKSAAKLLAAEVKDKKTGEILRKRCAVHWVTPDGFPVWQEYKKPIQTRLNLMFLGQFRLQPTINTNKDSEIDAHKQESGIAPNFVHSQDGSHLRKTVVWAHEKYGIESFALIHDSFGTIPADAANLFKAVRETMVDTYESCDVLADFYDQFADQLHESQLDKMPALPAKGNLNLRDILESDFAFA

SEQ ID NO: 757 - DNA, 2670 bp, synthetic construct
  misc_feature 1..2670: note = Variant of RNA polymerase
  source 1..2670: mol_type = other DNA
atgcaccatcaccatcaccatatgaacacgattaacatcgctaagaacgacttctctgacatcgaactggctgctatcccgttcaacactctggtcgaccattacggtgagggtttagctcgcgaacagttggcccttgagcatgagtcttacgaaatgggtgaaactcgtttccgcaagatgtttgagcgtcaacttaaagctggtgaggttgcggataacgctgccgccaagcctctcatcactaccctactccctaagatgattgcacgcattaacgactggtttgaggaagtgaaagctaagcgcggcaagcgcccgacagccttccagttcctgcaagaaatcaagccggaagccgtagcgtacatcaccattaagaccactctggcttgcctaaccagtgcggaccgtacaaccgttcaggctgtagcaagcgcaatcggttatgccattgaggacgaggctcgcttcggtcgtatccgtgaccttgaagctaagcacttcctgaaaaacgttgaggaacaactcaacaagcgcgtagggcacgtctacaagaaagcatttatgcaagttgtcgaggctgacatgctctctaagggtctactcggtggcgaggcgtggtcttcgtggcataaggaagactctattcatgtaggagtacgctgcatcgagatgctcattgagtcaaccggaatggttagcttacaccgccaaaatgctggcgtagtaggtaaagactctgagactatcgaactcgcacctgaatacgctgaggctattgcaacccgtgcaggtgcgctggctggcatctctccgatgttccaaccttgcgtagttcctcctaagccgtggactggcattactggtggtggctattgggctaacggtcgtcgtcctctggcgctggtgcgtactcacagtaagaaaggtctgatgcgctacgaagacgtttacatgcctgaggtgtacaaagcgattaacattgcgcaaaacaccgcctggtcgatcaacaagtgggtcctggcggtcgccaacgtaatcaccaagtggaagcattgtccggtcgaggacatccctgcgattgagcgtgaagaactcccgatgaaaccggaagacatcgacatgaatcctgaggctctcaccgcgtggaaacgtgctaaagctgctgtgtaccgcaaggacaaggctcgcaagtctcgccgtatcttgcttgagttcatgcttgagcaagccaataagtttgctaaccataaggccatctggttcccttacaacatggactggcgcggtcgtgtttacgctgtgtcaatgttcaacccgcaaggtaacgatatgaccaaaggactgcttacgctggcgaaaggtaaaccaatcggtaaggaaggttactactggctgaaaatccacggtgcaaactgtgcgggtgtcgataaggttccgttccctgagcgcatcaagttcattgaggaaaaccacgagaacatcatggcttgcgctaagtctccactggagaacacttggtgggctgagcaagatagtccgttctgcttccttgcgttctgctttgagtacgctggggtacagcaccacggcctgagctataactgctcccttccgctggcgtttgacgggtcttgctctggcatccagcacttctccgcgatgctccgagatgaggtaggtggtcgcgcggttaacttgcttcctagtgaaaccgttcaggacatctacgggattgttgctaagaaagtcaacgagattctacaagcagacgcaatcaatgggaccgataacgaagtagttaccgtgaccgatgagaacgaaggtgaaatctctgagaaagtcaagctgggcactaaggcactggctggtcaatggctggcatacggtgttactcgcagtgtgactaagcgttcagtcatgacgctggcttacgggtccaaagagttcggcttccgtaggcaagtgctgcgctggactattcagccagctattgattccggcaagggtctgatgttcactcagccgaatcaggctgctggatacatggctaagctgatttgggaatctgtgagcgtgacggtggtagctgcggttgaagcaatgaactggcttaagtctgctgctaagctgctggctgctgaggtcaaagataagaagactggagagattcttcgcaagcgttgcgctgtgcattgggtaactcctgatggtttccctgtgtggcaggaatacaagaagcctattcagacgcgcttgaacctgatgttcctcggtcagttccgcttacagcctaccattaacaccaacaaagatagcgagattgatgcacataaacaggtgtctggtatcgctcctaactttgtacacagccaagacggtagccaccttcgtaagactgtagtgtgggcacacgagaagtacggaatcgaatcttttgcactgattcacgactccttcggtaccattccggctgacgctgcgaacctgttcaaagcagtgcgcgaaactatggttgacacatatgagtcttgtgatgtactggctgatttctacgaccagttcgctgaccagttgcacgagtctcaattggacaaaatgccagcacttccggctaaaggtaacttgaacctccgtgacatcttagagtcggacttcgcgttcgcg

SEQ ID NO: 758 - protein, 890 aa, synthetic construct
  REGION 1..890: note = Variant of RNA polymerase
MHHHHHHMNTINIAKNDFSDIELAAIPFNTLVDHYGEGLAREQLALEHESYEMGETRFRKMFERQLKAGEVADNAAAKPLITTLLPKMIARINDWFEEVKAKRGKRPTAFQFLQEIKPEAVAYITIKTTLACLTSADRTTVQAVASAIGYAIEDEARFGRIRDLEAKHFLKNVEEQLNKRVGHVYKKAFMQVVEADMLSKGLLGGEAWSSWHKEDSIHVGVRCIEMLIESTGMVSLHRQNAGVVGKDSETIELAPEYAEAIATRAGALAGISPMFQPCVVPPKPWTGITGGGYWANGRRPLALVRTHSKKGLMRYEDVYMPEVYKAINIAQNTAWSINKWVLAVANVITKWKHCPVEDIPAIEREELPMKPEDIDMNPEALTAWKRAKAAVYRKDKARKSRRILLEFMLEQANKFANHKAIWFPYNMDWRGRVYAVSMFNPQGNDMTKGLLTLAKGKPIGKEGYYWLKIHGANCAGVDKVPFPERIKFIEENHENIMACAKSPLENTWWAEQDSPFCFLAFCFEYAGVQHHGLSYNCSLPLAFDGSCSGIQHFSAMLRDEVGGRAVNLLPSETVQDIYGIVAKKVNEILQADAINGTDNEVVTVTDENEGEISEKVKLGTKALAGQWLAYGVTRSVTKRSVMTLAYGSKEFGFRRQVLRWTIQPAIDSGKGLMFTQPNQAAGYMAKLIWESVSVTVVAAVEAMNWLKSAAKLLAAEVKDKKTGEILRKRCAVHWVTPDGFPVWQEYKKPIQTRLNLMFLGQFRLQPTINTNKDSEIDAHKQVSGIAPNFVHSQDGSHLRKTVVWAHEKYGIESFALIHDSFGTIPADAANLFKAVRETMVDTYESCDVLADFYDQFADQLHESQLDKMPALPAKGNLNLRDILESDFAFA

SEQ ID NO: 759 - DNA, 2670 bp, synthetic construct
  misc_feature 1..2670: note = Variant of RNA polymerase
  source 1..2670: mol_type = other DNA
atgcaccatcaccatcaccatatgaacacgattaacatcgctaagaacgacttctctgacatcgaactggctgctatcccgttcaacactctggtcgaccattacggtgagggtttagctcgcgaacagttggcccttgagcatgagtcttacgaaatgggtgaaactcgtttccgcaagatgtttgagcgtcaacttaaagctggtgaggttgcggataacgctgccgccaagcctctcatcactaccctactccctaagatgattgcacgcattaacgactggtttgaggaagtgaaagctaagcgcggcaagcgcccgacagccttccagttcctgcaagaaatcaagccggaagccgtagcgtacatcaccattaagaccactctggcttgcctaaccagtgcgggccgtacaaccgttcaggctgtagcaagcgcaatcggttatgccattgaggacgaggctcgcttcggtcgtatccgtgaccttgaagctaagcacttcctgaaaaacgttgaggaacaactcaacaagcgcgtagggcacgtctacaagaaagcatttatgcaagttgtcgaggctgacatgctctctaagggtctactcggtggcgaggcgtggtcttcgtggcataaggaagactctattcatgtaggagtacgctgcatcgagatgctcattgagtcaaccggaatggttagcttacaccgccaaaatgctggcgtagtaggtaaagactctgagactatcgaactcgcacctgaatacgctgaggctattgcaacccgtgcaggtgcgctggctggcatctctccgatgttccaaccttgcgtagttcctcctaagccgtggactggcattactggtggtggctattgggctaacggtcgtcgtcctctggcgctggtgcgtactcacagtaagaaaggtctgatgcgctacgaagacgtttacatgcctgaggtgtacaaagcgattaacattgcgcaaaacaccgcctggtcgatcaacaagtgggtcctggcggtcgccaacgtaatcaccaagtggaagcattgtccggtcgaggacatccctgcgattgagcgtgaagaactcccgatgaaaccggaagacatcgacatgaatcctgaggctctccgtgcgtggaaacgtgctaaagctgctgtggcgcgcaaggacaaggctcgcaagtctcgccgtatcttgcttgagttcatgcttgagcaagccaataagtttgctaaccataaggccatctggttcccttacaacatggactggcgcggtcgtgtttacgctgtgtcaatgttcaacccgcaaggtaacgatatgaccaaaggactgcttacgctggcgaaaggtaaaccaatcggtaaggaaggttactactggctgaaaatccacggtgcaaactgtgcgggtgtcgataaggttccgttccctgagcgcatcaagttcattgaggaaaaccacgagaacatcatggcttgcgctaagtctccactggagaacacttggtgggctgagcaagatagtccgttctgcttccttgcgttctgctttgagtacgctggggtacagcaccacggcctgagctataactgctcccttccgctggcgtttgacgggtcttgctctggcatccagcacttctccgcgatgctccgagatgaggtaggtggtcgcgcggttaacttgcttcctagtgaaaccgttcaggacatctacgggattgttgctaagaaagtcaacgagattctacaagcagacgcaatcaatgggaccgataacgaagtagttaccgtgaccgatgagaacgaaggtgaaatctctgagaaagtcaagctgggcactaaggcactggctggtcaatggctggcatacggtgttactcgcagtgtgactaagcgttcagtcatgacgctggcttacgggtccaaagagttcggcttccgtcagcaagtgctgcgctggactattcagccagctattgattccggcaagggtctgatgttcactcagccgaatcaggctgctggatacatggctaagctgatttgggaatctgtgagcgtgacggtggtagctgcggttgaagcaatgaactggcttaagtctgctgctaagctgctggctgctgaggtcaaagataaaaaaactggagagattcttcgcaagcgttgcgctgtgcattgggtaactcctgatggtttccctgtgtggcaggaatacaagaagcctattcagacgcgcttgaacctgatgttcctcggtcagttccgcttacagcctaccattaacaccaacaaagatagcgagattgatgcacataaacaggtgtctggtatcgctcctaactttgtacacagccaagacggtagccaccttcgtaagactgtagtgtgggcacacgagaagtacggaatcgaatcttttgcactgattcacgactccttcggtaccattccggctgacgctgcgaacctgttcaaagcagtgcgcgaaactatggttgacacatatgagtcttgtgatgtactggctgatttctacgaccagttcgctgaccagttgcacgagtctcaattggacaaaatgccagcacttccggctaaaggtaacttgaacctccgtgacatcttagagtcggacttcgcgttcgcg

SEQ ID NO: 760 - protein, 890 aa, synthetic construct
  REGION 1..890: note = Variant of RNA polymerase
MHHHHHHMNTINIAKNDFSDIELAAIPFNTLVDHYGEGLAREQLALEHESYEMGETRFRKMFERQLKAGEVADNAAAKPLITTLLPKMIARINDWFEEVKAKRGKRPTAFQFLQEIKPEAVAYITIKTTLACLTSAGRTTVQAVASAIGYAIEDEARFGRIRDLEAKHFLKNVEEQLNKRVGHVYKKAFMQVVEADMLSKGLLGGEAWSSWHKEDSIHVGVRCIEMLIESTGMVSLHRQNAGVVGKDSETIELAPEYAEAIATRAGALAGISPMFQPCVVPPKPWTGITGGGYWANGRRPLALVRTHSKKGLMRYEDVYMPEVYKAINIAQNTAWSINKWVLAVANVITKWKHCPVEDIPAIEREELPMKPEDIDMNPEALRAWKRAKAAVARKDKARKSRRILLEFMLEQANKFANHKAIWFPYNMDWRGRVYAVSMFNPQGNDMTKGLLTLAKGKPIGKEGYYWLKIHGANCAGVDKVPFPERIKFIEENHENIMACAKSPLENTWWAEQDSPFCFLAFCFEYAGVQHHGLSYNCSLPLAFDGSCSGIQHFSAMLRDEVGGRAVNLLPSETVQDIYGIVAKKVNEILQADAINGTDNEVVTVTDENEGEISEKVKLGTKALAGQWLAYGVTRSVTKRSVMTLAYGSKEFGFRQQVLRWTIQPAIDSGKGLMFTQPNQAAGYMAKLIWESVSVTVVAAVEAMNWLKSAAKLLAAEVKDKKTGEILRKRCAVHWVTPDGFPVWQEYKKPIQTRLNLMFLGQFRLQPTINTNKDSEIDAHKQVSGIAPNFVHSQDGSHLRKTVVWAHEKYGIESFALIHDSFGTIPADAANLFKAVRETMVDTYESCDVLADFYDQFADQLHESQLDKMPALPAKGNLNLRDILESDFAFA

SEQ ID NO: 761 - DNA, 2670 bp, synthetic construct
  misc_feature 1..2670: note = Variant of RNA polymerase
  source 1..2670: mol_type = other DNA
atgcaccatcaccatcaccatatgaacacgattaacatcgctaagaacgacttctctgacatcgaactggctgctatcccgttcaacactctggtcgaccattacggtgagggtttagctcgcgaacagttggcccttgagcatgagtcttacgaaatgggtgaaactcgtttccgcaagatgtttgagcgtcaacttaaagctggtgaggttgcggataacgctgccgccaagcctctcatcactaccctactccctaagatgattgcacgcattaacgactggtttgaggaagtgaaagctaagcgcggcaagcgcccgacagccttccagttcctgcaagaaatcaagccggaagccgtagcgtacatcaccattaagaccactctggcttgcctaaccagtgcggaccgtacaaccgttcaggctgtagcaagcgcaatcggttatgccattgaggacgaggctcgcttcggtcgtatccgtgaccttgaagctaagcacttcctgaaaaacgttgaggaacaactcaacaagcgcgtagggcacgtctacaagaaagcatttatgcaagttgtcgaggctgacatgctctctaagggtctactcggtggcgaggcgtggtcttcgtggcataaggaagactctattcatgtaggagtacgctgcatcgagatgctcattgagtcaaccggaatggttagcttacaccgccaaaatgctggcgtagtaggtaaagactctgagactatcgaactcgcacctgaatacgctgaggctattgcaacccgtgcaggtgcgctggctggcatctctccgatgttccaaccttgcgtagttcctcctaagccgtggactggcattactggtggtggctattgggctaacggtcgtcgtcctctggcgctggtgcgtactcacagtaagaaaggtctgatgcgctacgaagacgtttacatgcctgaggtgtacaaagcgattaacattgcgcaaaacaccgcctggtcgatcaacaagtgggtcctggcggtcgccaacgtaatcaccaagtggaagcattgtccggtcgaggacatccctgcgattgagcgtgaagaactcccgatgaaaccggaagacatcgacatgaatcctgaggctctcaccgcgtggaaacgtgctaaagctgctttttaccgcaaggacaaggctcgcaagtctcgccgtatcttgcttgagttcatgcttgagcaagccaataagtttgctaaccataaggccatctggttcccttacaacatggactggcgcggtcgtgtttacgctgtgtcaatgttcaacccgcaaggtaacgatatgaccaaaggactgcttacgctggcgaaaggtaaaccaatcggtaaggaaggttactactggctgaaaatccacggtgcaaactgtgcgggtgtcgataaggttccgttccctgagcgcatcaagttcattgaggaaaaccacgagaacatcatggcttgcgctaagtctccactggagaacacttggtgggctgagcaagatagtccgttctgcttccttgcgttctgctttgagtacgctggggtacagcaccacggcctgagctataactgctcccttccgctggcgtttgacgggtcttgctctggcatccagcacttctccgcgatgctccgagatgaggtaggtggtcgcgcggttaacttgcttcctagtgaaaccgttcaggacatctacgggattgttgctaagaaagtcaacgagattctacaagcagacgcaatcaatgggaccgataacgaagtagttaccgtgaccgatgagaacgaaggtgaaatctctgagaaagtcaagctgggcactaaggcactggctggtcaatggctggcatacggtgttactcgcagtgtgactaagcgttcagtcatgacgctggcttacgggtccaaagagttcggcttccgtcaacaagtgctgcgctggactattcagccagctattgattccggcaagggtctgatgttcactcagccgaatcaggctgctggatacatggctaagctgatttgggaatctgtgagcgtgacggtggtagctgcggttgaagcaatgaactggcttaagtctgctgctaagctgctggctgctgaggtcaaagataagaagactggagagattcttcgcaagcgttgcgctgtgcattgggtaactcctgatggtttccctgtgtggcaggaatacaagaagcctattcagacgcgcttgaacctgatgttcctcggtcagttccgcttacagcctaccattaacaccaacaaagatagcgagattgatgcacataaacaggtgtctggtatcgctcctaactttgtacacagccaagacggtagccaccttcgtaagactgtagtgtgggcacacgagaagtacggaatcgaatcttttgcactgattcacgactccttcggtaccattccggctgacgctgcgaacctgttcaaagcagtgcgcgaaactatggttgacacatatgagtcttgtgatgtactggctgatttctacgaccagttcgctgaccagttgcacgagtctcaattggacaaaatgccagcacttccggctaaaggtaacttgaacctccgtgacatcttagagtcggacttcgcgttcgcg

SEQ ID NO: 762 - protein, 890 aa, synthetic construct
  REGION 1..890: note = Variant of RNA polymerase
MHHHHHHMNTINIAKNDFSDIELAAIPFNTLVDHYGEGLAREQLALEHESYEMGETRFRKMFERQLKAGEVADNAAAKPLITTLLPKMIARINDWFEEVKAKRGKRPTAFQFLQEIKPEAVAYITIKTTLACLTSADRTTVQAVASAIGYAIEDEARFGRIRDLEAKHFLKNVEEQLNKRVGHVYKKAFMQVVEADMLSKGLLGGEAWSSWHKEDSIHVGVRCIEMLIESTGMVSLHRQNAGVVGKDSETIELAPEYAEAIATRAGALAGISPMFQPCVVPPKPWTGITGGGYWANGRRPLALVRTHSKKGLMRYEDVYMPEVYKAINIAQNTAWSINKWVLAVANVITKWKHCPVEDIPAIEREELPMKPEDIDMNPEALTAWKRAKAAFYRKDKARKSRRILLEFMLEQANKFANHKAIWFPYNMDWRGRVYAVSMFNPQGNDMTKGLLTLAKGKPIGKEGYYWLKIHGANCAGVDKVPFPERIKFIEENHENIMACAKSPLENTWWAEQDSPFCFLAFCFEYAGVQHHGLSYNCSLPLAFDGSCSGIQHFSAMLRDEVGGRAVNLLPSETVQDIYGIVAKKVNEILQADAINGTDNEVVTVTDENEGEISEKVKLGTKALAGQWLAYGVTRSVTKRSVMTLAYGSKEFGFRQQVLRWTIQPAIDSGKGLMFTQPNQAAGYMAKLIWESVSVTVVAAVEAMNWLKSAAKLLAAEVKDKKTGEILRKRCAVHWVTPDGFPVWQEYKKPIQTRLNLMFLGQFRLQPTINTNKDSEIDAHKQVSGIAPNFVHSQDGSHLRKTVVWAHEKYGIESFALIHDSFGTIPADAANLFKAVRETMVDTYESCDVLADFYDQFADQLHESQLDKMPALPAKGNLNLRDILESDFAFA

SEQ ID NO: 763 - DNA, 2670 bp, synthetic construct
  misc_feature 1..2670: note = Variant of RNA polymerase
  source 1..2670: mol_type = other DNA
atgcaccatcaccatcaccatatgaacacgattaacatcgctaagaacgacttctctgacatcgaactggctgctatcccgttcaacactctggtcgaccattacggtgagggtttagctcgcgaacagttggcccttgagcatgagtcttacgaaatgggtgaaactcgtttccgcaagatgtttgagcgtcaacttaaagctggtgaggttgcggataacgctgccgccaagcctctcatcactaccctactccctaagatgattgcacgcattaacgactggtttgaggaagtgaaagctaagcgcggcaagcgcccgacagccttccagttcctgcaagaaatcaagccggaagccgtagcgtacatcaccattaagaccactctggcttgcctaaccagtgcgggccgtacaaccgttcaggctgtagcaagcgcaatcggttatgccattgaggacgaggctcgcttcggtcgtatccgtgaccttgaagctaagcacttcctgaaaaacgttgaggaacaactcaacaagcgcgtagggcacgtctacaagaaagcatttatgcaagttgtcgaggctgacatgctctctaagggtctactcggtggcgaggcgtggtcttcgtggcataaggaagactctattcatgtaggagtacgctgcatcgagatgctcattgagtcaaccggaatggttagcttacaccgccaaaatgctggcgtagtaggtaaagactctgagactatcgaactcgcacctgaatacgctgaggctattgcaacccgtgcaggtgcgctggctggcatctctccgatgttccaaccttgcgtagttcctcctaagccgtggactggcattactggtggtggctattgggctaacggtcgtcgtcctctggcgctggtgcgtactcacagtaagaaaggtctgatgcgctacgaagacgtttacatgcctgaggtgtacaaagcgattaacattgcgcaaaacaccgcctggtcgatcaacaagtgggtcctggcggtcgccaacgtaatcaccaagtggaagcattgtccggtcgaggacatccctgcgattgagcgtgaagaactcccgatgaaaccggaagacatcgacatgaatcctgaggctctcaccgcgtggaaacgtgctaaagctgctgtgtaccgcaaggacaaggctcgcaagtctcgccgtatcttgcttgagttcatgcttgagcaagccaataagtttgctaaccataaggccatctggttcccttacaacatggactggcgcggtcgtgtttacgctgtgtcaatgttcaacccgcaaggtaacgatatgaccaaaggactgcttacgctggcgaaaggtaaaccaatcggtaaggaaggttactactggctgaaaatccacggtgcaaactgtgcgggtgtcgataaggttccgttccctgagcgcatcaagttcattgaggaaaaccacgagaacatcatggcttgcgctaagtctccactggagaacacttggtgggctgagcaagatagtccgttctgcttccttgcgttctgctttgagtacgctggggtacagcaccacggcctgagctataactgctcccttccgctggcgtttgacgggtcttgctctggcatccagcacttctccgcgatgctccgagatgaggtaggtggtcgcgcggttaacttgcttcctagtgaaaccgttcaggacatctacgggattgttgctaagaaagtcaacgagattctacaagcagacgcaatcaatgggaccgataacgaagtagttaccgtgaccgatgagaacgaaggtgaaatctctgagaaagtcaagctgggcactaaggcactggctggtcaatggctggcatacggtgttactcgcagtgtgactaagcgttcagtcatgacgctggcttacgggtccaaagagttcggcttccgtatgcaagtgctgcgctggactattcagccagctattgattccggcaagggtctgatgttcactcagccgaatcaggctgctggatacatggctaagctgatttgggaatctgtgagcgtgacggtggtagctgcggttgaagcaatgaactggcttaagtctgctgctaagctgctggctgctgaggtcaaagataagaccactggagagattcttcgcaagcgttgcgctgtgcattgggtaactcctgatggtttccctgtgtggcaggaatacaagaagcctattcagacgcgcttgaacctgatgttcctcggtcagttcagcttacagcctaccattaacaccaacaaagatagcgagattgatgcacataaacaggtgtctggtatcgctcctaactttgtacacagccaagacggtagccaccttcgtaagactgtagtgtgggcacacgagaagtacggaatcgaatcttttgcactgattcacgactccttcggtaccattccggctgacgctgcgaacctgttcaaagcagtgcgcgaaactatggttgacacatatgagtcttgtgatgtactggctgatttctacgaccagttcgctgaccagttgcacgagtctcaattggacaaaatgccagcacttccggctaaaggtaacttgaacctccgtgacatcttagagtcggacttcgcgttcgcg

SEQ ID NO: 764 - protein, 890 aa, synthetic construct
  REGION 1..890: note = Variant of RNA polymerase
MHHHHHHMNTINIAKNDFSDIELAAIPFNTLVDHYGEGLAREQLALEHESYEMGETRFRKMFERQLKAGEVADNAAAKPLITTLLPKMIARINDWFEEVKAKRGKRPTAFQFLQEIKPEAVAYITIKTTLACLTSAGRTTVQAVASAIGYAIEDEARFGRIRDLEAKHFLKNVEEQLNKRVGHVYKKAFMQVVEADMLSKGLLGGEAWSSWHKEDSIHVGVRCIEMLIESTGMVSLHRQNAGVVGKDSETIELAPEYAEAIATRAGALAGISPMFQPCVVPPKPWTGITGGGYWANGRRPLALVRTHSKKGLMRYEDVYMPEVYKAINIAQNTAWSINKWVLAVANVITKWKHCPVEDIPAIEREELPMKPEDIDMNPEALTAWKRAKAAVYRKDKARKSRRILLEFMLEQANKFANHKAIWFPYNMDWRGRVYAVSMFNPQGNDMTKGLLTLAKGKPIGKEGYYWLKIHGANCAGVDKVPFPERIKFIEENHENIMACAKSPLENTWWAEQDSPFCFLAFCFEYAGVQHHGLSYNCSLPLAFDGSCSGIQHFSAMLRDEVGGRAVNLLPSETVQDIYGIVAKKVNEILQADAINGTDNEVVTVTDENEGEISEKVKLGTKALAGQWLAYGVTRSVTKRSVMTLAYGSKEFGFRMQVLRWTIQPAIDSGKGLMFTQPNQAAGYMAKLIWESVSVTVVAAVEAMNWLKSAAKLLAAEVKDKTTGEILRKRCAVHWVTPDGFPVWQEYKKPIQTRLNLMFLGQFSLQPTINTNKDSEIDAHKQVSGIAPNFVHSQDGSHLRKTVVWAHEKYGIESFALIHDSFGTIPADAANLFKAVRETMVDTYESCDVLADFYDQFADQLHESQLDKMPALPAKGNLNLRDILESDFAFA

SEQ ID NO: 765 - DNA, 2670 bp, synthetic construct
  misc_feature 1..2670: note = Variant of RNA polymerase
  source 1..2670: mol_type = other DNA
atgcaccatcaccatcaccatatgaacacgattaacatcgctaagaacgacttctctgacatcgaactggctgctatcccgttcaacactctggtcgaccattacggtgagggtttagctcgcgaacagttggcccttgagcatgagtcttacgaaatgggtgaaactcgtttccgcaagatgtttgagcgtcaacttaaagctggtgaggttgcggataacgctgccgccaagcctctcatcactaccctactccctaagatgattgcacgcattaacgactggtttgaggaagtgaaagctaagcgcggcaagcgcccgacagccttccagttcctgcaagaaatcaagccggaagccgtagcgtacatcaccattaagaccactctggcttgcctaaccagtgcggaccgtacaaccgttcaggctgtagcaagcgcaatcggttatgccattgaggacgaggctcgcttcggtcgtatccgtgaccttgaagctaagcacttcctgaaaaacgttgaggaacaactcaacaagcgcgtagggcacgtctacaagaaagcatttatgcaagttgtcgaggctgacatgctctctaagggtctactcggtggcgaggcgtggtcttcgtggcataaggaagactctattcatgtaggagtacgctgcatcgagatgctcattgagtcaaccggaatggttagcttacaccgccaaaatgctggcgtagtaggtaaagactctgagactatcgaactcgcacctgaatacgctgaggctattgcaacccgtgcaggtgcgctggctggcatctctccgatgttccaaccttgcgtagttcctcctaagccgtggactggcattactggtggtggctattgggctaacggtcgtcgtcctctggcgctggtgcgtactcacagtaagaaaggtctgatgcgctacgaagacgtttacatgcctgaggtgtacaaagcgattaacattgcgcaaaacaccgcctggtcgatcaacaagtgggtcctggcggtcgccaacgtaatcaccaagtggaagcattgtccggtcgaggacatccctgcgattgagcgtgaagaactcccgatgaaaccggaagacatcgacatgaatcctgaggctctcaccgcgtggaaacgtgctaaagctgctgtgtaccgcaaggacaaggctcgcaagtctcgccgtatcttgcttgagttcatgcttgagcaagccaataagtttgctaaccataaggccatctggttcccttacaacatggactggcgcggtcgtgtttacgctgtgtcaatgttcaacccgcaaggtaacgatatgaccaaaggactgcttacgctggcgaaaggtaaaccaatcggtaaggaaggttactactggctgaaaatccacggtgcaaactgtgcgggtgtcgataaggttccgttccctgagcgcatcaagttcattgaggaaaaccacgagaacatcatggcttgcgctaagtctccactggagaacacttggtgggctgagcaagatagtccgttctgcttccttgcgttctgctttgagtacgctggggtacagcaccacggcctgagctataactgctcccttccgctggcgtttgacgggtcttgctctggcatccagcacttctccgcgatgctccgagatgaggtaggtggtcgcgcggttaacttgcttcctagtgaaaccgttcaggacatctacgggattgttgctaagaaagtcaacgagattctacaagcagacgcaatcaatgggaccgataacgaagtagttaccgtgaccgatgagaacgaaggtgaaatctctgagaaagtcaagctgggcactaaggcactggctggtcaatggctggcatacggtgttactcgcagtgtgactaagcgttcagtcatgacgctggcttacgggtccaaagagttcggcttccgtcaacaagtgctgcgctggactattcagccagctattgattccggcaagggtctgatgttcactcagccgaatcaggctgctggatacatggctaagctgatttgggaatctgtgagcgtgacgctggtagctgcggttgaagcaatgaactggcttaagtctgctgctaagctgctggctgctgaggtcaaagataagaagactggagagattcttcgcaagcgttgcgctgtgcattgggtaactcctgatggtttccctgtgtggcaggaatacaagaagcctattcagacgcgcttgaacctgatgttcctcggtcagttccgcttacagcctaccattaacaccaacaaagatagcgagattgatgcacataaacaggtgtctggtatcgctcctaactttgtacacagccaagacggtagccaccttcgtaagactgtagtgtgggcacacgagaagtacggaatcgaatcttttgcactgattcacgactccttcggtaccattccggctgacgctgcgaacctgttcaaagcagtgcgcgaaactatggttgacacatatgagtcttgtgatgtactggctgatttctacgaccagttcgctgaccagttgcacgagtctcaattggacaaaatgccagcacttccggctaaaggtaacttgaacctccgtgacatcttagagtcggacttcgcgttcgcg

SEQ ID NO: 766 - protein, 890 aa, synthetic construct
  REGION 1..890: note = Variant of RNA polymerase
MHHHHHHMNTINIAKNDFSDIELAAIPFNTLVDHYGEGLAREQLALEHESYEMGETRFRKMFERQLKAGEVADNAAAKPLITTLLPKMIARINDWFEEVKAKRGKRPTAFQFLQEIKPEAVAYITIKTTLACLTSADRTTVQAVASAIGYAIEDEARFGRIRDLEAKHFLKNVEEQLNKRVGHVYKKAFMQVVEADMLSKGLLGGEAWSSWHKEDSIHVGVRCIEMLIESTGMVSLHRQNAGVVGKDSETIELAPEYAEAIATRAGALAGISPMFQPCVVPPKPWTGITGGGYWANGRRPLALVRTHSKKGLMRYEDVYMPEVYKAINIAQNTAWSINKWVLAVANVITKWKHCPVEDIPAIEREELPMKPEDIDMNPEALTAWKRAKAAVYRKDKARKSRRILLEFMLEQANKFANHKAIWFPYNMDWRGRVYAVSMFNPQGNDMTKGLLTLAKGKPIGKEGYYWLKIHGANCAGVDKVPFPERIKFIEENHENIMACAKSPLENTWWAEQDSPFCFLAFCFEYAGVQHHGLSYNCSLPLAFDGSCSGIQHFSAMLRDEVGGRAVNLLPSETVQDIYGIVAKKVNEILQADAINGTDNEVVTVTDENEGEISEKVKLGTKALAGQWLAYGVTRSVTKRSVMTLAYGSKEFGFRQQVLRWTIQPAIDSGKGLMFTQPNQAAGYMAKLIWESVSVTLVAAVEAMNWLKSAAKLLAAEVKDKKTGEILRKRCAVHWVTPDGFPVWQEYKKPIQTRLNLMFLGQFRLQPTINTNKDSEIDAHKQVSGIAPNFVHSQDGSHLRKTVVWAHEKYGIESFALIHDSFGTIPADAANLFKAVRETMVDTYESCDVLADFYDQFADQLHESQLDKMPALPAKGNLNLRDILESDFAFA

SEQ ID NO: 767 - DNA, 2670 bp, synthetic construct
  misc_feature 1..2670: note = Variant of RNA polymerase
  source 1..2670: mol_type = other DNA
atgcaccatcaccatcaccatatgaacacgattaacatcgctaagaacgacttctctgacatcgaactggctgctatcccgttcaacactctggtcgaccattacggtgagggtttagctcgcgaacagttggcccttgagcatgagtcttacgaaatgggtgaaactcgtttccgcaagatgtttgagcgtcaacttaaagctggtgaggttgcggataacgctgccgccaagcctctcatcactaccctactccctaagatgattgcacgcattaacgactggtttgaggaagtgaaagctaagcgcggcaagcgcccgacagccttccagttcctgcaagaaatcaagccggaagccgtagcgtacatcaccattaagaccactctggcttgcctaaccagtgcggaccgtacaaccgttcaggctgtagcaagcgcaatcggttatgccattgaggacgaggctcgcttcggtcgtatccgtgaccttgaagctaagcacttcctgaaaaacgttgaggaacaactcaacaagcgcgtagggcacgtctacaagaaagcatttatgcaagttgtcgaggctgacatgctctctaagggtctactcggtggcgaggcgtggtcttcgtggcataaggaagactctattcatgtaggagtacgctgcatcgagatgctcattgagtcaaccggaatggttagcttacaccgccaaaatgctggcgtagtaggtaaagactctgagactatcgaactcgcacctgaatacgctgaggctattgcaacccgtgcaggtgcgctggctggcatctctccgatgttccaaccttgcgtagttcctcctaagccgtggactggcattactggtggtggctattgggctaacggtcgtcgtcctctggcgctggtgcgtactcacagtaagaaaggtctgatgcgctacgaagacgtttacatgcctgaggtgtacaaagcgattaacattgcgcaaaacaccgcctggtcgatcaacaagtgggtcctggcggtcgccaacgtaatcaccaagtggaagcattgtccggtcgaggacatccctgcgattgagcgtgaagaactcccgatgaaaccggaagacatcgacatgaatcctgaggctctcaccgcgtggaaacgtgctaaagctgctgtgtaccgcaaggacaaggctcgcaagtctcgccgtatcttgcttgagttcatgcttgagcaagccaataagtttgctaaccataaggccatctggttcccttacaacatggactggcgcggtcgtgtttacgctgtgtcaatgttcaacccgcaaggtaacgatatgaccaaaggactgcttacgctggcgaaaggtaaaccaatcggtaaggaaggttactactggctgaaaatccacggtgcaaactgtgcgggtgtcgataaggttccgttccctgagcgcatcaagttcattgaggaaaaccacgagaacatcatggcttgcgctaagtctccactggagaacacttggtgggctgagcaagatagtccgttctgcttccttgcgttctgctttgagtacgctggggtacagcaccacggcctgagctataactgctcccttccgctggcgtttgacgggtcttgctctggcatccagcacttctccgcgatgctccgagatgaggtaggtggtcgcgcggttaacttgcttcctagtgaaaccgttcaggacatctacgggattgttgctaagaaagtcaacgagattctacaagcagacgcaatcaatgggaccgataacgaagtagttaccgtgaccgatgagaacgaaggtgaaatctctgagaaagtcaagctgggcactaaggcactggctggtcaatggctggcatacggtgttactcgcagtgtgactaagcgttcagtcatgacgctggcttacgggtccaaagagttcggcttccgtcaacaagtgctgcgctggactattcagccagctattgattccggcaagggtcgtatgttcactcagccgaatcaggctgctggatacatggctaagctgatttgggaatctgtgagcgtgacggtggtagctgcggttgaagcaatgaactggcttaagtctgctgctaagctgctggctgctgaggtcaaagataagaagactggagagattcttcgcaagcgttgcgctgtgcattgggtaactcctgatggtttccctgtgtggcaggaatacaagaagcctattcagacgcgcttgaacctgatgttcctcggtcagttccgcttacagcctaccattaacaccaacaaagatagcgagattgatgcacataaacaggtgtctggtatcgctcctaactttgtacacagccaagacggtagccaccttcgtaagactgtagtgtgggcacacgagaagtacggaatcgaatcttttgcactgattcacgactccttcggtaccattccggctgacgctgcgaacctgttcaaagcagtgcgcgaaactatggttgacacatatgagtcttgtgatgtactggctgatttctacgaccagttcgctgaccagttgcacgagtctcaattggacaaaatgccagcacttccggctaaaggtaacttgaacctccgtgacatcttagagtcggacttcgcgttcgcg

SEQ ID NO: 768 - protein, 890 aa, synthetic construct
  REGION 1..890: note = Variant of RNA polymerase
MHHHHHHMNTINIAKNDFSDIELAAIPFNTLVDHYGEGLAREQLALEHESYEMGETRFRKMFERQLKAGEVADNAAAKPLITTLLPKMIARINDWFEEVKAKRGKRPTAFQFLQEIKPEAVAYITIKTTLACLTSADRTTVQAVASAIGYAIEDEARFGRIRDLEAKHFLKNVEEQLNKRVGHVYKKAFMQVVEADMLSKGLLGGEAWSSWHKEDSIHVGVRCIEMLIESTGMVSLHRQNAGVVGKDSETIELAPEYAEAIATRAGALAGISPMFQPCVVPPKPWTGITGGGYWANGRRPLALVRTHSKKGLMRYEDVYMPEVYKAINIAQNTAWSINKWVLAVANVITKWKHCPVEDIPAIEREELPMKPEDIDMNPEALTAWKRAKAAVYRKDKARKSRRILLEFMLEQANKFANHKAIWFPYNMDWRGRVYAVSMFNPQGNDMTKGLLTLAKGKPIGKEGYYWLKIHGANCAGVDKVPFPERIKFIEENHENIMACAKSPLENTWWAEQDSPFCFLAFCFEYAGVQHHGLSYNCSLPLAFDGSCSGIQHFSAMLRDEVGGRAVNLLPSETVQDIYGIVAKKVNEILQADAINGTDNEVVTVTDENEGEISEKVKLGTKALAGQWLAYGVTRSVTKRSVMTLAYGSKEFGFRQQVLRWTIQPAIDSGKGRMFTQPNQAAGYMAKLIWESVSVTVVAAVEAMNWLKSAAKLLAAEVKDKKTGEILRKRCAVHWVTPDGFPVWQEYKKPIQTRLNLMFLGQFRLQPTINTNKDSEIDAHKQVSGIAPNFVHSQDGSHLRKTVVWAHEKYGIESFALIHDSFGTIPADAANLFKAVRETMVDTYESCDVLADFYDQFADQLHESQLDKMPALPAKGNLNLRDILESDFAFA

SEQ ID NO: 769 - DNA, 2670 bp, synthetic construct
  misc_feature 1..2670: note = Variant of RNA polymerase
  source 1..2670: mol_type = other DNA
atgcaccatcaccatcaccatatgaacacgattaacatcgctaagaacgacttctctgacatcgaactggctgctatcccgttcaacactctggtcgaccattacggtgagggtttagctcgcgaacagttggcccttgagcatgagtcttacgaaatgggtgaaactcgtttccgcaagatgtttgagcgtcaacttaaagctggtgaggttgcggataacgctgccgccaagcctctcatcactaccctactccctaagatgattgcacgcattaacgactggtttgaggaagtgaaagctaagcgcggcaagcgcccgacagccttccagttcctgcaagaaatcaagccggaagccgtagcgtacatcaccattaagaccactctggcttgcctaaccagtgcggaccgtacaaccgttcaggctgtagcaagcgcaatcggttatgccattgaggacgaggctcgcttcggtcgtatccgtgaccttgaagctaagcacttcctgaaaaacgttgaggaacaactcaacaagcgcgtagggcacgtctacaagaaagcatttatgcaagttgtcgaggctgacatgctctctaagggtctactcggtggcgaggcgtggtcttcgtggcataaggaagactctattcatgtaggagtacgctgcatcgagatgctcattgagtcaaccggaatggttagcttacaccgccaaaatgctggcgtagtaggtaaagactctgagactatcgaactcgcacctgaatacgctgaggctattgcaacccgtgcaggtgcgctggctggcatctctccgatgttccaaccttgcgtagttcctcctaagccgtggactggcattactggtggtggctattgggctaacggtcgtcgtcctctggcgctggtgcgtactcacagtaagaaaggtctgatgcgctacgaagacgtttacatgcctgaggtgtacaaagcgattaacattgcgcaaaacaccgcctggtcgatcaacaagtgggtcctggcggtcgccaacgtaatcaccaagtggaagcattgtccggtcgaggacatccctgcgattgagcgtgaagaactcccgatgaaaccggaagacatcgacatgaatcctgaggctctcaccgcgtggaaacgtgctaaagctgctgtgtaccgcaaggacaaggctcgcaagtctcgccgtatcttgcttgagttcatgcttgagcaagccaataagtttgctaaccataaggccatctggttcccttacaacatggactggcgcggtcgtgtttacgctgtgtcaatgttcaacccgcaaggtaacgatatgaccaaaggactgcttacgctggcgaaaggtaaaccaatcggtaaggaaggttactactggctgaaaatccacggtgcaaactgtgcgggtgtcgataaggttccgttccctgagcgcatcaagttcattgaggaaaaccacgagaacatcatggcttgcgctaagtctccactggagaacacttggtgggctgagcaagatagtccgttctgcttccttgcgttctgctttgagtacgctggggtacagcaccacggcctgagctataactgctcccttccgctggcgtttgacgggtcttgctctggcatccagcacttctccgcgatgctccgagatgaggtaggtggtcgcgcggttaacttgcttcctagtgaaaccgttcaggacatctacgggattgttgctaagaaagtcaacgagattctacaagcagacgcaatcaatgggaccgataacgaagtagttaccgtgaccgatgagaacgaaggtgaaatctctgagaaagtcaagctgggcactaaggcactggctggtcaatggctggcatacggtgttactcgcagtgtgactaagcgttcagtcatgacgctggcttacgggtccaaagagttcggcttccgtcaacaagtgctgcgctggactattctgccagctattgattccggcaagggtctgatgttcactcagccgaatcaggctgctggatacatggctaagctgatttgggaatctgtgagcgtgacggtggtagctgcggttgaagcaatgaactggcttaagtctgctgctaagctgctggctgctgaggtcaaagataagaagactggagagattcttcgcaagcgttgcgctgtgcattgggtaactcctgatggtttccctgtgtggcaggaatacaagaagcctattcagacgcgcttgaacctgatgttcctcggtcagttccgcttacagcctaccattaacaccaacaaagatagcgagattgatgcacataaacaggtgtctggtatcgctcctaactttgtacacagccaagacggtagccaccttcgtaagactgtagtgtgggcacacgagaagtacggaatcgaatcttttgcactgattcacgactccttcggtaccattccggctgacgctgcgaacctgttcaaagcagtgcgcgaaactatggttgacacatatgagtcttgtgatgtactggctgatttctacgaccagttcgctgaccagttgcacgagtctcaattggacaaaatgccagcacttccggctaaaggtaacttgaacctccgtgacatcttagagtcggacttcgcgttcgcg

SEQ ID NO: 770 - protein, 890 aa, synthetic construct
  REGION 1..890: note = Variant of RNA polymerase
MHHHHHHMNTINIAKNDFSDIELAAIPFNTLVDHYGEGLAREQLALEHESYEMGETRFRKMFERQLKAGEVADNAAAKPLITTLLPKMIARINDWFEEVKAKRGKRPTAFQFLQEIKPEAVAYITIKTTLACLTSADRTTVQAVASAIGYAIEDEARFGRIRDLEAKHFLKNVEEQLNKRVGHVYKKAFMQVVEADMLSKGLLGGEAWSSWHKEDSIHVGVRCIEMLIESTGMVSLHRQNAGVVGKDSETIELAPEYAEAIATRAGALAGISPMFQPCVVPPKPWTGITGGGYWANGRRPLALVRTHSKKGLMRYEDVYMPEVYKAINIAQNTAWSINKWVLAVANVITKWKHCPVEDIPAIEREELPMKPEDIDMNPEALTAWKRAKAAVYRKDKARKSRRILLEFMLEQANKFANHKAIWFPYNMDWRGRVYAVSMFNPQGNDMTKGLLTLAKGKPIGKEGYYWLKIHGANCAGVDKVPFPERIKFIEENHENIMACAKSPLENTWWAEQDSPFCFLAFCFEYAGVQHHGLSYNCSLPLAFDGSCSGIQHFSAMLRDEVGGRAVNLLPSETVQDIYGIVAKKVNEILQADAINGTDNEVVTVTDENEGEISEKVKLGTKALAGQWLAYGVTRSVTKRSVMTLAYGSKEFGFRQQVLRWTILPAIDSGKGLMFTQPNQAAGYMAKLIWESVSVTVVAAVEAMNWLKSAAKLLAAEVKDKKTGEILRKRCAVHWVTPDGFPVWQEYKKPIQTRLNLMFLGQFRLQPTINTNKDSEIDAHKQVSGIAPNFVHSQDGSHLRKTVVWAHEKYGIESFALIHDSFGTIPADAANLFKAVRETMVDTYESCDVLADFYDQFADQLHESQLDKMPALPAKGNLNLRDILESDFAFA

SEQ ID NO: 771 - DNA, 2670 bp, synthetic construct
  misc_feature 1..2670: note = Variant of RNA polymerase
  source 1..2670: mol_type = other DNA
atgcaccatcaccatcaccatatgaacacgattaacatcgctaagaacgacttctctgacatcgaactggctgctatcccgttcaacactctggtcgaccattacggtgagggtttagctcgcgaacagttggcccttgagcatgagtcttacgaaatgggtgaaactcgtttccgcaagatgtttgagcgtcaacttaaagctggtgaggttgcggataacgctgccgccaagcctctcatcactaccctactccctaagatgattgcacgcattaacgactggtttgaggaagtgaaagctaagcgcggcaagcgcccgacagccttccagttcctgcaagaaatcaagccggaagccgtagcgtacatcaccattaagaccactctggcttgcctaaccagtgcggaccgtacaaccgttcaggctgtagcaagcgcaatcggttatgccattgaggacgaggctcgcttcggtcgtatccgtgaccttgaagctaagcacttcctgaaaaacgttgaggaacaactcaacaagcgcgtagggcacgtctacaagaaagcatttatgcaagttgtcgaggctgacatgctctctaagggtctactcggtggcgaggcgtggtcttcgtggcataaggaagactctattcatgtaggagtacgctgcatcgagatgctcattgagtcaaccggaatggttagcttacaccgccaaaatgctggcgtagtaggtaaagactctgagactatcgaactcgcacctgaatacgctgaggctattgcaacccgtgcaggtgcgctggctggcatctctccgatgttccaaccttgcgtagttcctcctaagccgtggactggcattactggtggtggctattgggctaacggtcgtcgtcctctggcgctggtgcgtactcacagtaagaaaggtctgatgcgctacgaagacgtttacatgcctgaggtgtacaaagcgattaacattgcgcaaaacaccgcctggtcgatcaacaagtgggtcctggcggtcgccaacgtaatcaccaagtggaagcattgtccggtcgaggacatccctgcgattgagcgtgaagaaacgccgatgaaaccggaagacatcgacatgaatcctgaggctctcaccgcgtggaaacgtgctaaagctgctgtgtaccgcaaggacaaggctcgcaagtctcgccgtatcttgcttgagttcatgcttgagcaagccaataagtttgctaaccataaggccatctggttcccttacaacatggactggcgcggtcgtgtttacgctgtgtcaatgttcaacccgcaaggtaacgatatgaccaaaggactgcttacgctggcgaaaggtaaaccaatcggtaaggaaggttactactggctgaaaatccacggtgcaaactgtgcgggtgtcgataaggttccgttccctgagcgcatcaagttcattgaggaaaaccacgagaacatcatggcttgcgctaagtctccactggagaacacttggtgggctgagcaagatagtccgttctgcttccttgcgttctgctttgagtacgctggggtacagcaccacggcctgagctataactgctcccttccgctggcgtttgacgggtcttgctctggcatccagcacttctccgcgatgctccgagatgaggtaggtggtcgcgcggttaacttgcttcctagtgaaaccgttcaggacatctacgggattgttgctaagaaagtcaacgagattctacaagcagacgcaatcaatgggaccgataacgaagtagttaccgtgaccgatgagaacgaaggtgaaatctctgagaaagtcaagctgggcactaaggcactggctggtcaatggctggcatacggtgttactcgcagtgtgactaagcgttcagtcatgacgctggcttacgggtccaaagagttcggcttccgtcaacaagtgctgcgctggactattcagccagctattgattccggcaagggtctgatgttcactcagccgaatcaggctgctggatacatggctaagctgatttgggaatctgtgagcgtgacggtggtagctgcggttgaagcaatgaactggcttaagtctgctgctaagctgctggctgctgaggtcaaagataagaagactggagagattcttcgcaagcgttgcgctgtgcattgggtaactcctgatggtttccctgtgtggcaggaatacaagaagcctattcagacgcgcttgaacctgatgttcctcggtcagttccgcttacagcctaccattaacaccaacaaagatagcgagattgatgcacataaacaggtgtctggtatcgctcctaactttgtacacagccaagacggtagccaccttcgtaagactgtagtgtgggcacacgagaagtacggaatcgaatcttttgcactgattcacgactccttcggtaccattccggctgacgctgcgaacctgttcaaagcagtgcgcgaaactatggttgacacatatgagtcttgtgatgtactggctgatttctacgaccagttcgctgaccagttgcacgagtctcaattggacaaaatgccagcacttccggctaaaggtaacttgaacctccgtgacatcttagagtcggacttcgcgttcgcg

SEQ ID NO: 772 - protein, 890 aa, synthetic construct
  REGION 1..890: note = Variant of RNA polymerase
MHHHHHHMNTINIAKNDFSDIELAAIPFNTLVDHYGEGLAREQLALEHESYEMGETRFRKMFERQLKAGEVADNAAAKPLITTLLPKMIARINDWFEEVKAKRGKRPTAFQFLQEIKPEAVAYITIKTTLACLTSADRTTVQAVASAIGYAIEDEARFGRIRDLEAKHFLKNVEEQLNKRVGHVYKKAFMQVVEADMLSKGLLGGEAWSSWHKEDSIHVGVRCIEMLIESTGMVSLHRQNAGVVGKDSETIELAPEYAEAIATRAGALAGISPMFQPCVVPPKPWTGITGGGYWANGRRPLALVRTHSKKGLMRYEDVYMPEVYKAINIAQNTAWSINKWVLAVANVITKWKHCPVEDIPAIEREETPMKPEDIDMNPEALTAWKRAKAAVYRKDKARKSRRILLEFMLEQANKFANHKAIWFPYNMDWRGRVYAVSMFNPQGNDMTKGLLTLAKGKPIGKEGYYWLKIHGANCAGVDKVPFPERIKFIEENHENIMACAKSPLENTWWAEQDSPFCFLAFCFEYAGVQHHGLSYNCSLPLAFDGSCSGIQHFSAMLRDEVGGRAVNLLPSETVQDIYGIVAKKVNEILQADAINGTDNEVVTVTDENEGEISEKVKLGTKALAGQWLAYGVTRSVTKRSVMTLAYGSKEFGFRQQVLRWTIQPAIDSGKGLMFTQPNQAAGYMAKLIWESVSVTVVAAVEAMNWLKSAAKLLAAEVKDKKTGEILRKRCAVHWVTPDGFPVWQEYKKPIQTRLNLMFLGQFRLQPTINTNKDSEIDAHKQVSGIAPNFVHSQDGSHLRKTVVWAHEKYGIESFALIHDSFGTIPADAANLFKAVRETMVDTYESCDVLADFYDQFADQLHESQLDKMPALPAKGNLNLRDILESDFAFA

SEQ ID NO: 773 - DNA, 2670 bp, synthetic construct
  misc_feature 1..2670: note = Variant of RNA polymerase
  source 1..2670: mol_type = other DNA
atgcaccatcaccatcaccatatgaacacgattaacatcgctaagaacgacttctctgacatcgaactggctgctatcccgttcaacactctggtcgaccattacggtgagggtttagctcgcgaacagttggcccttgagcatgagtcttacgaaatgggtgaaactcgtttccgcaagatgtttgagcgtcaacttaaagctggtgaggttgcggataacgctgccgccaagcctctcatcactaccctactccctaagatgattgcacgcattaacgactggtttgaggaagtgaaagctaagcgcggcaagcgcccgacagccttccagttcctgcaagaaatcaagccggaagccgtagcgtacatcaccattaagaccactctggcttgcctaaccagtgcggaccgtacaaccgttcaggctgtagcaagcgcaatcggttatgccattgaggacgaggctcgcttcggtcgtatccgtgaccttgaagctaagcacttcctgaaaaacgttgaggaacaactcaacaagcgcgtagggcacgtctacaagaaagcatttatgcaagttgtcgaggctgacatgctctctaagggtctactcggtggcgaggcgtggtcttcgtggcataaggaagactctattcatgtaggagtacgctgcatcgagatgctcattgagtcaaccggaatggttagcttacaccgccaaaatgctggcgtagtaggtaaagactctgagactatcgaactcgcacctgaatacgctgaggctattgcaacccgtgcaggtgcgctggctggcatctctccgatgttccaaccttgcgtagttcctcctaagccgtggactggcattactggtggtggctattgggctaacggtcgtcgtcctctggcgctggtgcgtactcacagtaagaaaggtctgatgcgctacgaagacgtttacatgcctgaggtgtacaaagcgattaacattgcgcaaaacaccgcctggtcgatcaacaagtgggtcctggcggtcgccaacgtaatcaccaagtggaagcattgtccggtcgaggacatccctgcgattgagcgtgaagaatttccgatgaaaccggaagacatcgacatgaatcctgaggctctcaccgcgtggaaacgtgctaaagctgctgtgtaccgcaaggacaaggctcgcaagtctcgccgtatcttgcttgagttcatgcttgagcaagccaataagtttgctaaccataaggccatctggttcccttacaacatggactggcgcggtcgtgtttacgctgtgtcaatgttcaacccgcaaggtaacgatatgaccaaaggactgcttacgctggcgaaaggtaaaccaatcggtaaggaaggttactactggctgaaaatccacggtgcaaactgtgcgggtgtcgataaggttccgttccctgagcgcatcaagttcattgaggaaaaccacgagaacatcatggcttgcgctaagtctccactggagaacacttggtgggctgagcaagatagtccgttctgcttccttgcgttctgctttgagtacgctggggtacagcaccacggcctgagctataactgctcccttccgctggcgtttgacgggtcttgctctggcatccagcacttctccgcgatgctccgagatgaggtaggtggtcgcgcggttaacttgcttcctagtgaaaccgttcaggacatctacgggattgttgctaagaaagtcaacgagattctacaagcagacgcaatcaatgggaccgataacgaagtagttaccgtgaccgatgagaacgaaggtgaaatctctgagaaagtcaagctgggcactaaggcactggctggtcaatggctggcatacggtgttactcgcagtgtgactaagcgttcagtcatgacgctggcttacgggtccaaagagttcggcttccgtcaacaagtgctgcgctggactattcagccagctattgattccggcaagggtctgatgttcactcagccgaatcaggctgctggatacatggctaagctgatttgggaatctgtgagcgtgacggtggtagctgcggttgaagcaatgaactggcttaagtctgctgctaagctgctggctgctgaggtcaaagataagaagactggagagattcttcgcaagcgttgcgctgtgcattgggtaactcctgatggtttccctgtgtggcaggaatacaagaagcctattcagacgcgcttgaacctgatgttcctcggtcagttccgcttacagcctaccattaacaccaacaaagatagcgagattgatgcacataaacaggtgtctggtatcgctcctaactttgtacacagccaagacggtagccaccttcgtaagactgtagtgtgggcacacgagaagtacggaatcgaatcttttgcactgattcacgactccttcggtaccattccggctgacgctgcgaacctgttcaaagcagtgcgcgaaactatggttgacacatatgagtcttgtgatgtactggctgatttctacgaccagttcgctgaccagttgcacgagtctcaattggacaaaatgccagcacttccggctaaaggtaacttgaacctccgtgacatcttagagtcggacttcgcgttcgcg

SEQ ID NO: 774 - protein, 890 aa, synthetic construct
  REGION 1..890: note = Variant of RNA polymerase
MHHHHHHMNTINIAKNDFSDIELAAIPFNTLVDHYGEGLAREQLALEHESYEMGETRFRKMFERQLKAGEVADNAAAKPLITTLLPKMIARINDWFEEVKAKRGKRPTAFQFLQEIKPEAVAYITIKTTLACLTSADRTTVQAVASAIGYAIEDEARFGRIRDLEAKHFLKNVEEQLNKRVGHVYKKAFMQVVEADMLSKGLLGGEAWSSWHKEDSIHVGVRCIEMLIESTGMVSLHRQNAGVVGKDSETIELAPEYAEAIATRAGALAGISPMFQPCVVPPKPWTGITGGGYWANGRRPLALVRTHSKKGLMRYEDVYMPEVYKAINIAQNTAWSINKWVLAVANVITKWKHCPVEDIPAIEREEFPMKPEDIDMNPEALTAWKRAKAAVYRKDKARKSRRILLEFMLEQANKFANHKAIWFPYNMDWRGRVYAVSMFNPQGNDMTKGLLTLAKGKPIGKEGYYWLKIHGANCAGVDKVPFPERIKFIEENHENIMACAKSPLENTWWAEQDSPFCFLAFCFEYAGVQHHGLSYNCSLPLAFDGSCSGIQHFSAMLRDEVGGRAVNLLPSETVQDIYGIVAKKVNEILQADAINGTDNEVVTVTDENEGEISEKVKLGTKALAGQWLAYGVTRSVTKRSVMTLAYGSKEFGFRQQVLRWTIQPAIDSGKGLMFTQPNQAAGYMAKLIWESVSVTVVAAVEAMNWLKSAAKLLAAEVKDKKTGEILRKRCAVHWVTPDGFPVWQEYKKPIQTRLNLMFLGQFRLQPTINTNKDSEIDAHKQVSGIAPNFVHSQDGSHLRKTVVWAHEKYGIESFALIHDSFGTIPADAANLFKAVRETMVDTYESCDVLADFYDQFADQLHESQLDKMPALPAKGNLNLRDILESDFAFA

SEQ ID NO: 775 - DNA, 2670 bp, synthetic construct
  misc_feature 1..2670: note = Variant of RNA polymerase
  source 1..2670: mol_type = other DNA
atgcaccatcaccatcaccatatgaacacgattaacatcgctaagaacgacttctctgacatcgaactggctgctatcccgttcaacactctggtcgaccattacggtgagggtttagctcgcgaacagttggcccttgagcatgagtcttacgaaatgggtgaaactcgtttccgcaagatgtttgagcgtcaacttaaagctggtgaggttgcggataacgctgccgccaagcctctcatcactaccctactccctaagatgattgcacgcattaacgactggtttgaggaagtgaaagctaagcgcggcaagcgcccgacagccttccagttcctgcaagaaatcaagccggaagccgtagcgtacatcaccattaagaccactctggcttgcctaaccagtgcgggccgtacaaccgttcaggctgtagcaagcgcaatcggttatgccattgaggacgaggctcgcttcggtcgtatccgtgaccttgaagctaagcacttcctgaaaaacgttgaggaacaactcaacaagcgcgtagggcacgtctacaagaaagcatttatgcaagttgtcgaggctgacatgctctctaagggtctactcggtggcgaggcgtggtcttcgtggcataaggaagactctattcatgtaggagtacgctgcatcgagatgctcattgagtcaaccggaatggttagcttacaccgccaaaatgctggcgtagtaggtaaagactctgagactatcgaactcgcacctgaatacgctgaggctattgcaacccgtgcaggtgcgctggctggcatctctccgatgttccaaccttgcgtagttcctcctaagccgtggactggcattactggtggtggctattgggctaacggtcgtcgtcctctggcgctggtgcgtactcacagtaagaaaggtctgatgcgctacgaagacgtttacatgcctgaggtgtacaaagcgattaacattgcgcaaaacaccgcctggtcgatcaacaagtgggtcctggcggtcgccaacgtaatcaccaagtggaagcattgtccggtcgaggacatccctgcgattgagcgtgaagaactcccgatgaaaccggaagacatcgacatgaatcctgaggctctcggtgcgtggaaacgtgctaaagctgctgtgtaccgcaaggacaaggctcgcaagtctcgccgtatcttgcttgagttcatgcttgagcaagccaataagtttgctaaccataaggccatctggttcccttacaacatggactggcgcggtcgtgtttacgctgtgtcaatgttcaacccgcaaggtaacgatatgaccaaaggactgcttacgctggcgaaaggtaaaccaatcggtaaggaaggttactactggctgaaaatccacggtgcaaactgtgcgggtgtcgataaggttccgttccctgagcgcatcaagttcattgaggaaaaccacgagaacatcatggcttgcgctaagtctccactggagaacacttggtgggctgagcaagatagtccgttctgcttccttgcgttctgctttgagtacgctggggtacagcaccacggcctgagctataactgctcccttccgctggcgtttgacgggtcttgctctggcatccagcacttctccgcgatgctccgagatgaggtaggtggtcgcgcggttaacttgcttcctagtgaaaccgttcaggacatctacgggattgttgctaagaaagtcaacgagattctacaagcagacgcaatcaatgggaccgataacgaagtagttaccgtgaccgatgagaacgaaggtgaaatctctgagaaagtcaagctgggcactaaggcactggctggtcaatggctggcatacggtgttactcgcagtgtgactaagcgttcagtcatgacgctggcttacgggtccaaagagttcggcttccgtcagcaagtgctgcgctggactattcagccagctattgattccggcaagggtctgatgttcactcagccgaatcaggctgctggatacatggctaagctgatttgggaatctgtgagcgtgacggtggtagctgcggttgaagcaatgaactggcttaagtctgctgctaagctgctggctgctgaggtcaaagataagaagactggagagattcttcgcaagcgttgcgctgtgcattgggtaactcctgatggtttccctgtgtggcaggaatacaagaagcctattcagacgcgcttgaacctgatgttcctcggtcagttccgcttacagcctaccattaacaccaacaaagatagcgagattgatgcacataaacaggtgtctggtatcgctcctaactttgtacacagccaagacggtagccaccttcgtaagactgtagtgtgggcacacgagaagtacggaatcgaatcttttgcactgattcacgactccttcggtaccattccggctgacgctgcgaacctgttcaaagcagtgcgcgaaactatggttgacacatatgagtcttgtgatgtactggctgatttctacgaccagttcgctgaccagttgcacgagtctcaattggacaaaatgccagcacttccggctaaaggtaacttgaacctccgtgacatcttagagtcggacttcgcgttcgcg

SEQ ID NO: 776 - protein, 890 aa, synthetic construct
  REGION 1..890: note = Variant of RNA polymerase
MHHHHHHMNTINIAKNDFSDIELAAIPFNTLVDHYGEGLAREQLALEHESYEMGETRFRKMFERQLKAGEVADNAAAKPLITTLLPKMIARINDWFEEVKAKRGKRPTAFQFLQEIKPEAVAYITIKTTLACLTSAGRTTVQAVASAIGYAIEDEARFGRIRDLEAKHFLKNVEEQLNKRVGHVYKKAFMQVVEADMLSKGLLGGEAWSSWHKEDSIHVGVRCIEMLIESTGMVSLHRQNAGVVGKDSETIELAPEYAEAIATRAGALAGISPMFQPCVVPPKPWTGITGGGYWANGRRPLALVRTHSKKGLMRYEDVYMPEVYKAINIAQNTAWSINKWVLAVANVITKWKHCPVEDIPAIEREELPMKPEDIDMNPEALGAWKRAKAAVYRKDKARKSRRILLEFMLEQANKFANHKAIWFPYNMDWRGRVYAVSMFNPQGNDMTKGLLTLAKGKPIGKEGYYWLKIHGANCAGVDKVPFPERIKFIEENHENIMACAKSPLENTWWAEQDSPFCFLAFCFEYAGVQHHGLSYNCSLPLAFDGSCSGIQHFSAMLRDEVGGRAVNLLPSETVQDIYGIVAKKVNEILQADAINGTDNEVVTVTDENEGEISEKVKLGTKALAGQWLAYGVTRSVTKRSVMTLAYGSKEFGFRQQVLRWTIQPAIDSGKGLMFTQPNQAAGYMAKLIWESVSVTVVAAVEAMNWLKSAAKLLAAEVKDKKTGEILRKRCAVHWVTPDGFPVWQEYKKPIQTRLNLMFLGQFRLQPTINTNKDSEIDAHKQVSGIAPNFVHSQDGSHLRKTVVWAHEKYGIESFALIHDSFGTIPADAANLFKAVRETMVDTYESCDVLADFYDQFADQLHESQLDKMPALPAKGNLNLRDILESDFAFA

SEQ ID NO: 777 - DNA, 2670 bp, synthetic construct
  misc_feature 1..2670: note = Variant of RNA polymerase
  source 1..2670: mol_type = other DNA
atgcaccatcaccatcaccatatgaacacgattaacatcgctaagaacgacttctctgacatcgaactggctgctatcccgttcaacactctggtcgaccattacggtgagggtttagctcgcgaacagttggcccttgagcatgagtcttacgaaatgggtgaaactcgtttccgcaagatgtttgagcgtcaacttaaagctggtgaggttgcggataacgctgccgccaagcctctcatcactaccctactccctaagatgattgcacgcattaacgactggtttgaggaagtgaaagctaagcgcggcaagcgcccgacagccttccagttcctgcaagaaatcaagccggaagccgtagcgtacatcaccattaagaccactctggcttgcctaaccagtgcgggccgtacaaccgttcaggctgtagcaagcgcaatcggttatgccattgaggacgaggctcgcttcggtcgtatccgtgaccttgaagctaagcacttcctgaaaaacgttgaggaacaactcaacaagcgcgtagggcacgtctacaagaaagcatttatgcaagttgtcgaggctgacatgctctctaagggtctactcggtggcgaggcgtggtcttcgtggcataaggaagactctattcatgtaggagtacgctgcatcgagatgctcattgagtcaaccggaatggttagcttacaccgccaaaatgctggcgtagtaggtaaagactctgagactatcgaactcgcacctgaatacgctgaggctattgcaacccgtgcaggtgcgctggctggcatctctccgatgttccaaccttgcgtagttcctcctaagccgtggactggcattactggtggtggctattgggctaacggtcgtcgtcctctggcgctggtgcgtactcacagtaagaaaggtctgatgcgctacgaagacgtttacatgcctgaggtgtacaaagcgattaacattgcgcaaaacaccgcctggtcgatcaacaagtgggtcctggcggtcgccaacgtaatcaccaagtggaagcattgtccggtcgaggacatccctgcgattgagcgtgaagaactcccgatgaaaccggaagacatcgacatgaatcctgaggctctcggtgcgtggaaacgtgctaaagctgctgtgcgccgcaaggacaaggctcgcaagtctcgccgtatcttgcttgagttcatgcttgagcaagccaataagtttgctaaccataaggccatctggttcccttacaacatggactggcgcggtcgtgtttacgctgtgtcaatgttcaacccgcaaggtaacgatatgaccaaaggactgcttacgctggcgaaaggtaaaccaatcggtaaggaaggttactactggctgaaaatccacggtgcaaactgtgcgggtgtcgataaggttccgttccctgagcgcatcaagttcattgaggaaaaccacgagaacatcatggcttgcgctaagtctccactggagaacacttggtgggctgagcaagatagtccgttctgcttccttgcgttctgctttgagtacgctggggtacagcaccacggcctgagctataactgctcccttccgctggcgtttgacgggtcttgctctggcatccagcacttctccgcgatgctccgagatgaggtaggtggtcgcgcggttaacttgcttcctagtgaaaccgttcaggacatctacgggattgttgctaagaaagtcaacgagattctacaagcagacgcaatcaatgggaccgataacgaagtagttaccgtgaccgatgagaacgaaggtgaaatctctgagaaagtcaagctgggcactaaggcactggctggtcaatggctggcatacggtgttactcgcagtgtgactaagcgttcagtcatgacgctggcttacgggtccaaaatgttcggcttccgtatgcaagtgctgcgctggactattcagccagctattgattccggcaagggtctgatgttcactcagccgaatcaggctgctggatacatggctaagctgatttgggaatctgtgagcgtgacggtggtagctgcggttgaagcaatgaactggcttaagtctgctgctaagctgctggctgctgaggtcaaagataagaagactggagagattcttcgcaagcgttgcgctgtgcattgggtaactcctgatggtttccctgtgtggcaggaatacaagaagcctattcagacgcgcttgaacctgatgttcctcggtcagttccgcttacagcctaccattaacaccaacaaagatagcgagattgatgcacataaacaggagtctggtatcgctcctaactttgtacacagccaagacggtagccaccttcgtaagactgtagtgtgggcacacgagaagtacggaatcgaatcttttgcactgattcacgactccttcggtaccattccggctgacgctgcgaacctgttcaaagcagtgcgcgaaactatggttgacacatatgagtcttgtgatgtactggctgatttctacgaccagttcgctgaccagttgcacgagtctcaattggacaaaatgccagcacttccggctaaaggtaacttgaacctccgtgacatcttagagtcggacttcgcgttcgcg

SEQ ID NO: 778 - protein, 890 aa, synthetic construct
  REGION 1..890: note = Variant of RNA polymerase
MHHHHHHMNTINIAKNDFSDIELAAIPFNTLVDHYGEGLAREQLALEHESYEMGETRFRKMFERQLKAGEVADNAAAKPLITTLLPKMIARINDWFEEVKAKRGKRPTAFQFLQEIKPEAVAYITIKTTLACLTSAGRTTVQAVASAIGYAIEDEARFGRIRDLEAKHFLKNVEEQLNKRVGHVYKKAFMQVVEADMLSKGLLGGEAWSSWHKEDSIHVGVRCIEMLIESTGMVSLHRQNAGVVGKDSETIELAPEYAEAIATRAGALAGISPMFQPCVVPPKPWTGITGGGYWANGRRPLALVRTHSKKGLMRYEDVYMPEVYKAINIAQNTAWSINKWVLAVANVITKWKHCPVEDIPAIEREELPMKPEDIDMNPEALGAWKRAKAAVRRKDKARKSRRILLEFMLEQANKFANHKAIWFPYNMDWRGRVYAVSMFNPQGNDMTKGLLTLAKGKPIGKEGYYWLKIHGANCAGVDKVPFPERIKFIEENHENIMACAKSPLENTWWAEQDSPFCFLAFCFEYAGVQHHGLSYNCSLPLAFDGSCSGIQHFSAMLRDEVGGRAVNLLPSETVQDIYGIVAKKVNEILQADAINGTDNEVVTVTDENEGEISEKVKLGTKALAGQWLAYGVTRSVTKRSVMTLAYGSKMFGFRMQVLRWTIQPAIDSGKGLMFTQPNQAAGYMAKLIWESVSVTVVAAVEAMNWLKSAAKLLAAEVKDKKTGEILRKRCAVHWVTPDGFPVWQEYKKPIQTRLNLMFLGQFRLQPTINTNKDSEIDAHKQESGIAPNFVHSQDGSHLRKTVVWAHEKYGIESFALIHDSFGTIPADAANLFKAVRETMVDTYESCDVLADFYDQFADQLHESQLDKMPALPAKGNLNLRDILESDFAFA

SEQ ID NO: 779 - DNA, 2670 bp, synthetic construct
  misc_feature 1..2670: note = Variant of RNA polymerase
  source 1..2670: mol_type = other DNA
atgcaccatcaccatcaccatatgaacacgattaacatcgctaagaacgacttctctgacatcgaactggctgctatcccgttcaacactctggtcgaccattacggtgagggtttagctcgcgaacagttggcccttgagcatgagtcttacgaaatgggtgaaactcgtttccgcaagatgtttgagcgtcaacttaaagctggtgaggttgcggataacgctgccgccaagcctctcatcactaccctactccctaagatgattgcacgcattaacgactggtttgaggaagtgaaagctaagcgcggcaagcgcccgacagccttccagttcctgcaagaaatcaagccggaagccgtagcgtacatcaccattaagaccactctggcttgcctaaccagtgcgggccgtacaaccgttcaggctgtagcaagcgcaatcggttatgccattgaggacgaggctcgcttcggtcgtatccgtgaccttgaagctaagcacttcctgaaaaacgttgaggaacaactcaacaagcgcgtagggcacgtctacaagaaagcatttatgcaagttgtcgaggctgacatgctctctaagggtctactcggtggcgaggcgtggtcttcgtggcataaggaagactctattcatgtaggagtacgctgcatcgagatgctcattgagtcaaccggaatggttagcttacaccgccaaaatgctggcgtagtaggtaaagactctgagactatcgaactcgcacctgaatacgctgaggctattgcaacccgtgcaggtgcgctggctggcatctctccgatgttccaaccttgcgtagttcctcctaagccgtggactggcattactggtggtggctattgggctaacggtcgtcgtcctctggcgctggtgcgtactcacagtaagaaaggtctgatgcgctacgaagacgtttacatgcctgaggtgtacaaagcgattaacattgcgcaaaacaccgcctggtcgatcaacaagtgggtcctggcggtcgccaacgtaatcaccaagtggaagcattgtccggtcgaggacatccctgcgattgagcgtgaagaactcccgatgaaaccggaagacatcgacatgaatcctgaggctctccgtgcgtggaaacgtgctaaagctgctgtgtaccgcaaggacaaggctcgcaagtctcgccgtatcttgcttgagttcatgcttgagcaagccaataagtttgctaaccataaggccatctggttcccttacaacatggactggcgcggtcgtgtttacgctgtgtcaatgttcaacccgcaaggtaacgatatgaccaaaggactgcttacgctggcgaaaggtaaaccaatcggtaaggaaggttactactggctgaaaatccacggtgcaaactgtgcgggtgtcgataaggttccgttccctgagcgcatcaagttcattgaggaaaaccacgagaacatcatggcttgcgctaagtctccactggagaacacttggtgggctgagcaagatagtccgttctgcttccttgcgttctgctttgagtacgctggggtacagcaccacggcctgagctataactgctcccttccgctggcgtttgacgggtcttgctctggcatccagcacttctccgcgatgctccgagatgaggtaggtggtcgcgcggttaacttgcttcctagtgaaaccgttcaggacatctacgggattgttgctaagaaagtcaacgagattctacaagcagacgcaatcaatgggaccgataacgaagtagttaccgtgaccgatgagaacgaaggtgaaatctctgagaaagtcaagctgggcactaaggcactggctggtcaatggctgcgttacggtgttactcgcagtgtgactaagcgttcagtcatgacgctggcttacgggtccaaagagttcggcttccgtcagcaagtgctgcgctacactattcagccagctattgattccggcaagggtactatgttcactcagccgaatcaggctgctggatacatggctaagctgatttgggaatctgtgagcgtgacggtggtagctgcggttgaagcaatgaactggcttaagtctgctgctaagctgctggctgctgaggtcaaagataaaaaaactggagagattcttcgcaagcgttgcgctgtgcattgggtaactcctgatggtttccctgtgtggcaggaatacaagaagcctattcagacgcgcttgaacctgatgttcctcggtcagttccgcttacagcctaccattaacaccaacaaagatagcgagattgatgcacataaacaggtgtctggtatcgctcctaactttgtacacagccaagacggtagccaccttcgtaagactgtagtgtgggcacacgagaagtacggaatcgaatcttttgcactgattcacgactccttcggtaccattccggctgacgctgcgaacctgttcaaagcagtgcgcgaaactatggttgacacatatgagtcttgtgatgtactggctgatttctacgaccagttcgctgaccagttgcacgagtctcaattggacaaaatgccagcacttccggctaaaggtaacttgaacctccgtgacatcttagagtcggacttcgcgttcgcg

SEQ ID NO: 780 - protein, 890 aa, synthetic construct
  REGION 1..890: note = Variant of RNA polymerase
MHHHHHHMNTINIAKNDFSDIELAAIPFNTLVDHYGEGLAREQLALEHESYEMGETRFRKMFERQLKAGEVADNAAAKPLITTLLPKMIARINDWFEEVKAKRGKRPTAFQFLQEIKPEAVAYITIKTTLACLTSAGRTTVQAVASAIGYAIEDEARFGRIRDLEAKHFLKNVEEQLNKRVGHVYKKAFMQVVEADMLSKGLLGGEAWSSWHKEDSIHVGVRCIEMLIESTGMVSLHRQNAGVVGKDSETIELAPEYAEAIATRAGALAGISPMFQPCVVPPKPWTGITGGGYWANGRRPLALVRTHSKKGLMRYEDVYMPEVYKAINIAQNTAWSINKWVLAVANVITKWKHCPVEDIPAIEREELPMKPEDIDMNPEALRAWKRAKAAVYRKDKARKSRRILLEFMLEQANKFANHKAIWFPYNMDWRGRVYAVSMFNPQGNDMTKGLLTLAKGKPIGKEGYYWLKIHGANCAGVDKVPFPERIKFIEENHENIMACAKSPLENTWWAEQDSPFCFLAFCFEYAGVQHHGLSYNCSLPLAFDGSCSGIQHFSAMLRDEVGGRAVNLLPSETVQDIYGIVAKKVNEILQADAINGTDNEVVTVTDENEGEISEKVKLGTKALAGQWLRYGVTRSVTKRSVMTLAYGSKEFGFRQQVLRYTIQPAIDSGKGTMFTQPNQAAGYMAKLIWESVSVTVVAAVEAMNWLKSAAKLLAAEVKDKKTGEILRKRCAVHWVTPDGFPVWQEYKKPIQTRLNLMFLGQFRLQPTINTNKDSEIDAHKQVSGIAPNFVHSQDGSHLRKTVVWAHEKYGIESFALIHDSFGTIPADAANLFKAVRETMVDTYESCDVLADFYDQFADQLHESQLDKMPALPAKGNLNLRDILESDFAFA

SEQ ID NO: 781 - DNA, 2670 bp, synthetic construct
  misc_feature 1..2670: note = Variant of RNA polymerase
  source 1..2670: mol_type = other DNA
atgcaccatcaccatcaccatatgaacacgattaacatcgctaagaacgacttctctgacatcgaactggctgctatcccgttcaacactctggtcgaccattacggtgagggtttagctcgcgaacagttggcccttgagcatgagtcttacgaaatgggtgaaactcgtttccgcaagatgtttgagcgtcaacttaaagctggtgaggttgcggataacgctgccgccaagcctctcatcactaccctactccctaagatgattgcacgcattaacgactggtttgaggaagtgaaagctaagcgcggcaagcgcccgacagccttccagttcctgcaagaaatcaagccggaagccgtagcgtacatcaccattaagaccactctggcttgcctaaccagtgcggaccgtacaaccgttcaggctgtagcaagcgcaatcggttatgccattgaggacgaggctcgcttcggtcgtatccgtgaccttgaagctaagcacttcctgaaaaacgttgaggaacaactcaacaagcgcgtagggcacgtctacaagaaagcatttatgcaagttgtcgaggctgacatgctctctaagggtctactcggtggcgaggcgtggtcttcgtggcataaggaagactctattcatgtaggagtacgctgcatcgagatgctcattgagtcaaccggaatggttagcttacaccgccaaaatgctggcgtagtaggtaaagactctgagactatcgaactcgcacctgaatacgctgaggctattgcaacccgtgcaggtgcgctggctggcatctctccgatgttccaaccttgcgtagttcctcctaagccgtggactggcattactggtggtggctattgggctaacggtcgtcgtcctctggcgctggtgcgtactcacagtaagaaaggtctgatgcgctacgaagacgtttacatgcctgaggtgtacaaagcgattaacattgcgcaaaacaccgcctggtcgatcaacaagtgggtcctggcggtcgccaacgtaatcaccaagtggaagcattgtccggtcgaggacatccctgcgattgagcgtgaagaactcccgatgaaaccggaagacatcgacatgaatcctgaggctctcaccgcgtggaaacgtgctaaagctgcttcgtaccgcaaggacaaggctcgcaagtctcgccgtatcttgcttgagttcatgcttgagcaagccaataagtttgctaaccataaggccatctggttcccttacaacatggactggcgcggtcgtgtttacgctgtgtcaatgttcaacccgcaaggtaacgatatgaccaaaggactgcttacgctggcgaaaggtaaaccaatcggtaaggaaggttactactggctgaaaatccacggtgcaaactgtgcgggtgtcgataaggttccgttccctgagcgcatcaagttcattgaggaaaaccacgagaacatcatggcttgcgctaagtctccactggagaacacttggtgggctgagcaagatagtccgttctgcttccttgcgttctgctttgagtacgctggggtacagcaccacggcctgagctataactgctcccttccgctggcgtttgacgggtcttgctctggcatccagcacttctccgcgatgctccgagatgaggtaggtggtcgcgcggttaacttgcttcctagtgaaaccgttcaggacatctacgggattgttgctaagaaagtcaacgagattctacaagcagacgcaatcaatgggaccgataacgaagtagttaccgtgaccgatgagaacgaaggtgaaatctctgagaaagtcaagctgggcactaaggcactggctggtcaatggctggcatacggtgttactcgcagtgtgactaagcgttcagtcatgacgctggcttacgggtccaaagagttcggcttccgtcaacaagtgctgcgctggactattcagccagctattgattccggcaagggtctgatgttcactcagccgaatcaggctgctggatacatggctaagctgatttgggaatctgtgagcgtgacggtggtagctgcggttgaagcaatgaactggcttaagtctgctgctaagctgctggctgctgaggtcaaagataagaagactggagagattcttcgcaagcgttgcgctgtgcattgggtaactcctgatggtttccctgtgtggcaggaatacaagaagcctattcagacgcgcttgaacctgatgttcctcggtcagttccgcttacagcctaccattaacaccaacaaagatagcgagattgatgcacataaacaggtgtctggtatcgctcctaactttgtacacagccaagacggtagccaccttcgtaagactgtagtgtgggcacacgagaagtacggaatcgaatcttttgcactgattcacgactccttcggtaccattccggctgacgctgcgaacctgttcaaagcagtgcgcgaaactatggttgacacatatgagtcttgtgatgtactggctgatttctacgaccagttcgctgaccagttgcacgagtctcaattggacaaaatgccagcacttccggctaaaggtaacttgaacctccgtgacatcttagagtcggacttcgcgttcgcg

SEQ ID NO: 782 - protein, 890 aa, synthetic construct
  REGION 1..890: note = Variant of RNA polymerase
MHHHHHHMNTINIAKNDFSDIELAAIPFNTLVDHYGEGLAREQLALEHESYEMGETRFRKMFERQLKAGEVADNAAAKPLITTLLPKMIARINDWFEEVKAKRGKRPTAFQFLQEIKPEAVAYITIKTTLACLTSADRTTVQAVASAIGYAIEDEARFGRIRDLEAKHFLKNVEEQLNKRVGHVYKKAFMQVVEADMLSKGLLGGEAWSSWHKEDSIHVGVRCIEMLIESTGMVSLHRQNAGVVGKDSETIELAPEYAEAIATRAGALAGISPMFQPCVVPPKPWTGITGGGYWANGRRPLALVRTHSKKGLMRYEDVYMPEVYKAINIAQNTAWSINKWVLAVANVITKWKHCPVEDIPAIEREELPMKPEDIDMNPEALTAWKRAKAASYRKDKARKSRRILLEFMLEQANKFANHKAIWFPYNMDWRGRVYAVSMFNPQGNDMTKGLLTLAKGKPIGKEGYYWLKIHGANCAGVDKVPFPERIKFIEENHENIMACAKSPLENTWWAEQDSPFCFLAFCFEYAGVQHHGLSYNCSLPLAFDGSCSGIQHFSAMLRDEVGGRAVNLLPSETVQDIYGIVAKKVNEILQADAINGTDNEVVTVTDENEGEISEKVKLGTKALAGQWLAYGVTRSVTKRSVMTLAYGSKEFGFRQQVLRWTIQPAIDSGKGLMFTQPNQAAGYMAKLIWESVSVTVVAAVEAMNWLKSAAKLLAAEVKDKKTGEILRKRCAVHWVTPDGFPVWQEYKKPIQTRLNLMFLGQFRLQPTINTNKDSEIDAHKQVSGIAPNFVHSQDGSHLRKTVVWAHEKYGIESFALIHDSFGTIPADAANLFKAVRETMVDTYESCDVLADFYDQFADQLHESQLDKMPALPAKGNLNLRDILESDFAFA

SEQ ID NO: 783 - DNA, 2670 bp, synthetic construct
  misc_feature 1..2670: note = Variant of RNA polymerase
  source 1..2670: mol_type = other DNA
atgcaccatcaccatcaccatatgaacacgattaacatcgctaagaacgacttctctgacatcgaactggctgctatcccgttcaacactctggtcgaccattacggtgagggtttagctcgcgaacagttggcccttgagcatgagtcttacgaaatgggtgaaactcgtttccgcaagatgtttgagcgtcaacttaaagctggtgaggttgcggataacgctgccgccaagcctctcatcactaccctactccctaagatgattgcacgcattaacgactggtttgaggaagtgaaagctaagcgcggcaagcgcccgacagccttccagttcctgcaagaaatcaagccggaagccgtagcgtacatcaccattaagaccactctggcttgcctaaccagtgcggaccgtacaaccgttcaggctgtagcaagcgcaatcggttatgccattgaggacgaggctcgcttcggtcgtatccgtgaccttgaagctaagcacttcctgaaaaacgttgaggaacaactcaacaagcgcgtagggcacgtctacaagaaagcatttatgcaagttgtcgaggctgacatgctctctaagggtctactcggtggcgaggcgtggtcttcgtggcataaggaagactctattcatgtaggagtacgctgcatcgagatgctcattgagtcaaccggaatggttagcttacaccgccaaaatgctggcgtagtaggtaaagactctgagactatcgaactcgcacctgaatacgctgaggctattgcaacccgtgcaggtgcgctggctggcatctctccgatgttccaaccttgcgtagttcctcctaagccgtggactggcattactggtggtggctattgggctaacggtcgtcgtcctctggcgctggtgcgtactcacagtaagaaaggtctgatgcgctacgaagacgtttacatgcctgaggtgtacaaagcgattaacattgcgcaaaacaccgcctggtcgatcaacaagtgggtcctggcggtcgccaacgtaatcaccaagtggaagcattgtccggtcgaggacatccctgcgattgagcgtgaagaactcccgatgaaaccggaagacatcgacatgaatcctgaggctctcaccgcgtggaaacgtgctaaagctgctgtgtaccgcaaggacaaggctcgcaagtctcgccgtatcttgcttgagttcatgcttgagcaagccaataagtttgctaaccataaggccatctggttcccttacaacatggactggcgcggtcgtgtttacgctgtgtcaatgttcaacccgcaaggtaacgatatgaccaaaggactgcttacgctggcgaaaggtaaaccaatcggtaaggaaggttactactggctgaaaatccacggtgcaaactgtgcgggtgtcgataaggttccgttccctgagcgcatcaagttcattgaggaaaaccacgagaacatcatggcttgcgctaagtctccactggagaacacttggtgggctgagcaagatagtccgttctgcttccttgcgttctgctttgagtacgctggggtacagcaccacggcctgagctataactgctcccttccgctggcgtttgacgggtcttgctctggcatccagcacttctccgcgatgctccgagatgaggtaggtggtcgcgcggttaacttgcttcctagtgaaaccgttcaggacatctacgggattgttgctaagaaagtcaacgagattctacaagcagacgcaatcaatgggaccgataacgaagtagttaccgtgaccgatgagaacgaaggtgaaatctctgagaaagctaagctgggcactaaggcactggctggtcaatggctggcatacggtgttactcgcagtgtgactaagcgttcagtcatgacgctggcttacgggtccaaagagttcggcttccgtcaacaagtgctgcgctggactattcagccagctattgattccggcaagggtctgatgttcactcagccgaatcaggctgctggatacatggctaagctgatttgggaatctgtgagcgtgacggtggtagctgcggttgaagcaatgaactggcttaagtctgctgctaagctgctggctgctgaggtcaaagataagaagactggagagattcttcgcaagcgttgcgctgtgcattgggtaactcctgatggtttccctgtgtggcaggaatacaagaagcctattcagacgcgcttgaacctgatgttcctcggtcagttccgcttacagcctaccattaacaccaacaaagatagcgagattgatgcacataaacaggtgtctggtatcgctcctaactttgtacacagccaagacggtagccaccttcgtaagactgtagtgtgggcacacgagaagtacggaatcgaatcttttgcactgattcacgactccttcggtaccattccggctgacgctgcgaacctgttcaaagcagtgcgcgaaactatggttgacacatatgagtcttgtgatgtactggctgatttctacgaccagttcgctgaccagttgcacgagtctcaattggacaaaatgccagcacttccggctaaaggtaacttgaacctccgtgacatcttagagtcggacttcgcgttcgcg

SEQ ID NO: 784 - protein, 890 aa, synthetic construct
  REGION 1..890: note = Variant of RNA polymerase
MHHHHHHMNTINIAKNDFSDIELAAIPFNTLVDHYGEGLAREQLALEHESYEMGETRFRKMFERQLKAGEVADNAAAKPLITTLLPKMIARINDWFEEVKAKRGKRPTAFQFLQEIKPEAVAYITIKTTLACLTSADRTTVQAVASAIGYAIEDEARFGRIRDLEAKHFLKNVEEQLNKRVGHVYKKAFMQVVEADMLSKGLLGGEAWSSWHKEDSIHVGVRCIEMLIESTGMVSLHRQNAGVVGKDSETIELAPEYAEAIATRAGALAGISPMFQPCVVPPKPWTGITGGGYWANGRRPLALVRTHSKKGLMRYEDVYMPEVYKAINIAQNTAWSINKWVLAVANVITKWKHCPVEDIPAIEREELPMKPEDIDMNPEALTAWKRAKAAVYRKDKARKSRRILLEFMLEQANKFANHKAIWFPYNMDWRGRVYAVSMFNPQGNDMTKGLLTLAKGKPIGKEGYYWLKIHGANCAGVDKVPFPERIKFIEENHENIMACAKSPLENTWWAEQDSPFCFLAFCFEYAGVQHHGLSYNCSLPLAFDGSCSGIQHFSAMLRDEVGGRAVNLLPSETVQDIYGIVAKKVNEILQADAINGTDNEVVTVTDENEGEISEKAKLGTKALAGQWLAYGVTRSVTKRSVMTLAYGSKEFGFRQQVLRWTIQPAIDSGKGLMFTQPNQAAGYMAKLIWESVSVTVVAAVEAMNWLKSAAKLLAAEVKDKKTGEILRKRCAVHWVTPDGFPVWQEYKKPIQTRLNLMFLGQFRLQPTINTNKDSEIDAHKQVSGIAPNFVHSQDGSHLRKTVVWAHEKYGIESFALIHDSFGTIPADAANLFKAVRETMVDTYESCDVLADFYDQFADQLHESQLDKMPALPAKGNLNLRDILESDFAFA

SEQ ID NO: 785 - DNA, 2670 bp, synthetic construct
  misc_feature 1..2670: note = Variant of RNA polymerase
  source 1..2670: mol_type = other DNA
atgcaccatcaccatcaccatatgaacacgattaacatcgctaagaacgacttctctgacatcgaactggctgctatcccgttcaacactctggtcgaccattacggtgagggtttagctcgcgaacagttggcccttgagcatgagtcttacgaaatgggtgaaactcgtttccgcaagatgtttgagcgtcaacttaaagctggtgaggttgcggataacgctgccgccaagcctctcatcactaccctactccctaagatgattgcacgcattaacgactggtttgaggaagtgaaagctaagcgcggcaagcgcccgacagccttccagttcctgcaagaaatcaagccggaagccgtagcgtacatcaccattaagaccactctggcttgcctaaccagtgcggaccgtacaaccgttcaggctgtagcaagcgcaatcggttatgccattgaggacgaggctcgcttcggtcgtatccgtgaccttgaagctaagcacttcctgaaaaacgttgaggaacaactcaacaagcgcgtagggcacgtctacaagaaagcatttatgcaagttgtcgaggctgacatgctctctaagggtctactcggtggcgaggcgtggtcttcgtggcataaggaagactctattcatgtaggagtacgctgcatcgagatgctcattgagtcaaccggaatggttagcttacaccgccaaaatgctggcgtagtaggtaaagactctgagactatcgaactcgcacctgaatacgctgaggctattgcaacccgtgcaggtgcgctggctggcatctctccgatgttccaaccttgcgtagttcctcctaagccgtggactggcattactggtggtggctattgggctaacggtcgtcgtcctctggcgctggtgcgtactcacagtaagaaaggtctgatgcgctacgaagacgtttacatgcctgaggtgtacaaagcgattaacattgcgcaaaacaccgcctggtcgatcaacaagtgggtcctggcggtcgccaacgtaatcaccaagtggaagcattgtccggtcgaggacatccctgcgattgagcgtgaagaactcccgatgaaaccggaagacatcgacatgaatcctgaggctctcaccgcgtggaaacgtgctaaagctgctgtgtaccgcaaggacaaggctcgcaagtctcgccgtatcttgcttgagttcatgcttgagcaagccaataagtttgctaaccataaggccatctggttcccttacaacatggactggcgcggtcgtgtttacgctgtgtcaatgttcaacccgcaaggtaacgatatgaccaaaggactgcttacgctggcgaaaggtaaaccaatcggtaaggaaggttactactggctgaaaatccacggtgcaaactgtgcgggtgtcgataaggttccgttccctgagcgcatcaagttcattgaggaaaaccacgagaacatcatggcttgcgctaagtctccactggagaacacttggtgggctgagcaagatagtccgttctgcttccttgcgttctgctttgagtacgctggggtacagcaccacggcctgagctataactgctcccttccgctggcgtttgacgggtcttgctctggcatccagcacttctccgcgatgctccgagatgaggtaggtggtcgcgcggttaacttgcttcctagtgaaaccgttcaggacatctacgggattgttgctaagaaagtcaacgagattctacaagcagacgcaatcaatgggaccgataacgaagtagttaccgtgaccgatgagaacgaaggtgaaatctctgagaaagtcaagctgggcactaaggcactggctggtcaatggctggcatacggtgttactcgcagtgtgactaagcgttcagtcatgacgctggcttacgggtccaaagagttcggcttccgtcaacaagtgctgcgctggactattcagccagctattgattccggcaagggtctgatgttcactcagccgaatcaggctgctggatacatggctaagctgatttggtcttctgtgagcgtgacggtggtagctgcggttgaagcaatgaactggcttaagtctgctgctaagctgctggctgctgaggtcaaagataagaagactggagagattcttcgcaagcgttgcgctgtgcattgggtaactcctgatggtttccctgtgtggcaggaatacaagaagcctattcagacgcgcttgaacctgatgttcctcggtcagttccgcttacagcctaccattaacaccaacaaagatagcgagattgatgcacataaacaggtgtctggtatcgctcctaactttgtacacagccaagacggtagccaccttcgtaagactgtagtgtgggcacacgagaagtacggaatcgaatcttttgcactgattcacgactccttcggtaccattccggctgacgctgcgaacctgttcaaagcagtgcgcgaaactatggttgacacatatgagtcttgtgatgtactggctgatttctacgaccagttcgctgaccagttgcacgagtctcaattggacaaaatgccagcacttccggctaaaggtaacttgaacctccgtgacatcttagagtcggacttcgcgttcgcg

SEQ ID NO: 786 - protein, 890 aa, synthetic construct
  REGION 1..890: note = Variant of RNA polymerase
MHHHHHHMNTINIAKNDFSDIELAAIPFNTLVDHYGEGLAREQLALEHESYEMGETRFRKMFERQLKAGEVADNAAAKPLITTLLPKMIARINDWFEEVKAKRGKRPTAFQFLQEIKPEAVAYITIKTTLACLTSADRTTVQAVASAIGYAIEDEARFGRIRDLEAKHFLKNVEEQLNKRVGHVYKKAFMQVVEADMLSKGLLGGEAWSSWHKEDSIHVGVRCIEMLIESTGMVSLHRQNAGVVGKDSETIELAPEYAEAIATRAGALAGISPMFQPCVVPPKPWTGITGGGYWANGRRPLALVRTHSKKGLMRYEDVYMPEVYKAINIAQNTAWSINKWVLAVANVITKWKHCPVEDIPAIEREELPMKPEDIDMNPEALTAWKRAKAAVYRKDKARKSRRILLEFMLEQANKFANHKAIWFPYNMDWRGRVYAVSMFNPQGNDMTKGLLTLAKGKPIGKEGYYWLKIHGANCAGVDKVPFPERIKFIEENHENIMACAKSPLENTWWAEQDSPFCFLAFCFEYAGVQHHGLSYNCSLPLAFDGSCSGIQHFSAMLRDEVGGRAVNLLPSETVQDIYGIVAKKVNEILQADAINGTDNEVVTVTDENEGEISEKVKLGTKALAGQWLAYGVTRSVTKRSVMTLAYGSKEFGFRQQVLRWTIQPAIDSGKGLMFTQPNQAAGYMAKLIWSSVSVTVVAAVEAMNWLKSAAKLLAAEVKDKKTGEILRKRCAVHWVTPDGFPVWQEYKKPIQTRLNLMFLGQFRLQPTINTNKDSEIDAHKQVSGIAPNFVHSQDGSHLRKTVVWAHEKYGIESFALIHDSFGTIPADAANLFKAVRETMVDTYESCDVLADFYDQFADQLHESQLDKMPALPAKGNLNLRDILESDFAFA

SEQ ID NO: 787 - DNA, 2670 bp, synthetic construct
  misc_feature 1..2670: note = Variant of RNA polymerase
  source 1..2670: mol_type = other DNA
atgcaccatcaccatcaccatatgaacacgattaacatcgctaagaacgacttctctgacatcgaactggctgctatcccgttcaacactctggtcgaccattacggtgagggtttagctcgcgaacagttggcccttgagcatgagtcttacgaaatgggtgaaactcgtttccgcaagatgtttgagcgtcaacttaaagctggtgaggttgcggataacgctgccgccaagcctctcatcactaccctactccctaagatgattgcacgcattaacgactggtttgaggaagtgaaagctaagcgcggcaagcgcccgacagccttccagttcctgcaagaaatcaagccggaagccgtagcgtacatcaccattaagaccactctggcttgcctaaccagtgcggaccgtacaaccgttcaggctgtagcaagcgcaatcggttatgccattgaggacgaggctcgcttcggtcgtatccgtgaccttgaagctaagcacttcctgaaaaacgttgaggaacaactcaacaaccgcgtagggcacgtctacaagaaagcatttatgcaagttgtcgaggctgacatgctctctaagggtctactcggtggcgaggcgtggtcttcgtggcataaggaagactctattcatgtaggagtacgctgcatcgagatgctcattgagtcaaccggaatggttagcttacaccgccaaaatgctggcgtagtaggtaaagactctgagactatcgaactcgcacctgaatacgctgaggctattgcaacccgtgcaggtgcgctggctggcatctctccgatgttccaaccttgcgtagttcctcctaagccgtggactggcattactggtggtggctattgggctaacggtcgtcgtcctctggcgctggtgcgtactcacagtaagaaaggtctgatgcgctacgaagacgtttacatgcctgaggtgtacaaagcgattaacattgcgcaaaacaccgcctggtcgatcaacaagtgggtcctggcggtcgccaacgtaatcaccaagtggaagcattgtccggtcgaggacatccctgcgattgagcgtgaagaactcccgatgaaaccggaagacatcgacatgaatcctgaggctctcaccgcgtggaaacgtgctaaagctgctgtgtaccgcaaggacaaggctcgcaagtctcgccgtatcttgcttgagttcatgcttgagcaagccaataagtttgctaaccataaggccatctggttcccttacaacatggactggcgcggtcgtgtttacgctgtgtcaatgttcaacccgcaaggtaacgatatgaccaaaggactgcttacgctggcgaaaggtaaaccaatcggtaaggaaggttactactggctgaaaatccacggtgcaaactgtgcgggtgtcgataaggttccgttccctgagcgcatcaagttcattgaggaaaaccacgagaacatcatggcttgcgctaagtctccactggagaacacttggtgggctgagcaagatagtccgttctgcttccttgcgttctgctttgagtacgctggggtacagcaccacggcctgagctataactgctcccttccgctggcgtttgacgggtcttgctctggcatccagcacttctccgcgatgctccgagatgaggtaggtggtcgcgcggttaacttgcttcctagtgaaaccgttcaggacatctacgggattgttgctaagaaagtcaacgagattctacaagcagacgcaatcaatgggaccgataacgaagtagttaccgtgaccgatgagaacgaaggtgaaatctctgagaaagtcaagctgggcactaaggcactggctggtcaatggctggcatacggtgttactcgcagtgtgactaagcgttcagtcatgacgctggcttacgggtccaaagagttcggcttccgtcaacaagtgctgcgctggactattcagccagctattgattccggcaagggtctgatgttcactcagccgaatcaggctgctggatacatggctaagctgatttgggaatctgtgagcgtgacggtggtagctgcggttgaagcaatgaactggcttaagtctgctgctaagctgctggctgctgaggtcaaagataagaagactggagagattcttcgcaagcgttgcgctgtgcattgggtaactcctgatggtttccctgtgtggcaggaatacaagaagcctattcagacgcgcttgaacctgatgttcctcggtcagttccgcttacagcctaccattaacaccaacaaagatagcgagattgatgcacataaacaggtgtctggtatcgctcctaactttgtacacagccaagacggtagccaccttcgtaagactgtagtgtgggcacacgagaagtacggaatcgaatcttttgcactgattcacgactccttcggtaccattccggctgacgctgcgaacctgttcaaagcagtgcgcgaaactatggttgacacatatgagtcttgtgatgtactggctgatttctacgaccagttcgctgaccagttgcacgagtctcaattggacaaaatgccagcacttccggctaaaggtaacttgaacctccgtgacatcttagagtcggacttcgcgttcgcg

SEQ ID NO: 788 - protein, 890 aa, synthetic construct
  REGION 1..890: note = Variant of RNA polymerase
MHHHHHHMNTINIAKNDFSDIELAAIPFNTLVDHYGEGLAREQLALEHESYEMGETRFRKMFERQLKAGEVADNAAAKPLITTLLPKMIARINDWFEEVKAKRGKRPTAFQFLQEIKPEAVAYITIKTTLACLTSADRTTVQAVASAIGYAIEDEARFGRIRDLEAKHFLKNVEEQLNNRVGHVYKKAFMQVVEADMLSKGLLGGEAWSSWHKEDSIHVGVRCIEMLIESTGMVSLHRQNAGVVGKDSETIELAPEYAEAIATRAGALAGISPMFQPCVVPPKPWTGITGGGYWANGRRPLALVRTHSKKGLMRYEDVYMPEVYKAINIAQNTAWSINKWVLAVANVITKWKHCPVEDIPAIEREELPMKPEDIDMNPEALTAWKRAKAAVYRKDKARKSRRILLEFMLEQANKFANHKAIWFPYNMDWRGRVYAVSMFNPQGNDMTKGLLTLAKGKPIGKEGYYWLKIHGANCAGVDKVPFPERIKFIEENHENIMACAKSPLENTWWAEQDSPFCFLAFCFEYAGVQHHGLSYNCSLPLAFDGSCSGIQHFSAMLRDEVGGRAVNLLPSETVQDIYGIVAKKVNEILQADAINGTDNEVVTVTDENEGEISEKVKLGTKALAGQWLAYGVTRSVTKRSVMTLAYGSKEFGFRQQVLRWTIQPAIDSGKGLMFTQPNQAAGYMAKLIWESVSVTVVAAVEAMNWLKSAAKLLAAEVKDKKTGEILRKRCAVHWVTPDGFPVWQEYKKPIQTRLNLMFLGQFRLQPTINTNKDSEIDAHKQVSGIAPNFVHSQDGSHLRKTVVWAHEKYGIESFALIHDSFGTIPADAANLFKAVRETMVDTYESCDVLADFYDQFADQLHESQLDKMPALPAKGNLNLRDILESDFAFA

SEQ ID NO: 789 - DNA, 2670 bp, synthetic construct
  misc_feature 1..2670: note = Variant of RNA polymerase
  source 1..2670: mol_type = other DNA
atgcaccatcaccatcaccatatgaacacgattaacatcgctaagaacgacttctctgacatcgaactggctgctatcccgttcaacactctggtcgaccattacggtgagggtttagctcgcgaacagttggcccttgagcatgagtcttacgaaatgggtgaaactcgtttccgcaagatgtttgagcgtcaacttaaagctggtgaggttgcggataacgctgccgccaagcctctcatcactaccctactccctaagatgattgcacgcattaacgactggtttgaggaagtgaaagctaagcgcggcaagcgcccgacagccttccagttcctgcaagaaatcaagccggaagccgtagcgtacatcaccattaagaccactctggcttgcctaaccagtgcgggccgtacaaccgttcaggctgtagcaagcgcaatcggttatgccattgaggacgaggctcgcttcggtcgtatccgtgaccttgaagctaagcacttcctgaaaaacgttgaggaacaactcaacaagcgcgtagggcacgtctacaagaaagcatttatgcaagttgtcgaggctgacatgctctctaagggtctactcggtggcgaggcgtggtcttcgtggcataaggaagactctattcatgtaggagtacgctgcatcgagatgctcattgagtcaaccggaatggttagcttacaccgccaaaatgctggcgtagtaggtaaagactctgagactatcgaactcgcacctgaatacgctgaggctattgcaacccgtgcaggtgcgctggctggcatctctccgatgttccaaccttgcgtagttcctcctaagccgtggactggcattactggtggtggctattgggctaacggtcgtcgtcctctggcgctggtgcgtactcacagtaagaaaggtctgatgcgctacgaagacgtttacatgcctgaggtgtacaaagcgattaacattgcgcaaaacaccgcctggtcgatcaacaagtgggtcctggcggtcgccaacgtaatcaccaagtggaagcattgtccggtcgaggacatccctgcgattgagcgtgaagaactcccgatgaaaccggaagacatcgacatgaatcctgaggctctcaccgcgtggaaacgtgctaaagctgctgtgtaccgcaaggacaaggctcgcaagtctcgccgtatcttgcttgagttcatgcttgagcaagccaataagtttgctaaccataaggccatctggttcccttacaacatggactggcgcggtcgtgtttacgctgtgtcaatgttcaacccgcaaggtaacgatatgaccaaaggactgcttacgctggcgaaaggtaaaccaatcggtaaggaaggttactactggctgaaaatccacggtgcaaactgtgcgggtgtcgataaggttccgttccctgagcgcatcaagttcattgaggaaaaccacgagaacatcatggcttgcgctaagtctccactggagaacacttggtgggctgagcaagatagtccgttctgcttccttgcgttctgctttgagtacgctggggtacagcaccacggcctgagctataactgctcccttccgctggcgtttgacgggtcttgctctggcatccagcacttctccgcgatgctccgagatgaggtaggtggtcgcgcggttaacttgcttcctagtgaaaccgttcaggacatctacgggattgttgctaagaaagtcaacgagattctacaagcagacgcaatcaatgggaccgataacgaagtagttaccgtgaccgatgagaacgaaggtgaaatctctgagaaagtcaagctgggcactaaggcactggctggtcaatggctggcatacggtgttactcgcagtgtgactaagcgttcagtcatgacgctggcttacgggtccaaagagttcggcttccgtcaacaagtgctgcgctggactattcagccagctattgattccggcaagggtctgatgttcactcagccgaatcaggctgctggatacatggctaagctgatttgggaatctgtgagcgtgacggtggtagctgcggttgaagcaatgaactggcttaagtctgctgctaagctgctggctgctgaggtcaaagataagaagactggagagattcttcgcaagcgttgcgctgtgcattgggtaactcctgatggtttccctgtgtggcaggaatacaagaagcctattcagacgcgcttgaacctgatgttcctcggtcagttccgcttacagcctaccattaacaccaacaaagatagcgagattgatgcacataaacaggtgtctggtatcgctcctaactttgtacacagccaagacggtagccaccttcgtaagactgtagtgtgggcacacgagaagtacggaatcgaatcttttgcactgattcacgactccttcggtaccattccggctgacgctgcgaacctgttcaaagcagtgcgcgaaactatggttgacacatatgagtcttgtgatgtactggctgatttctacgaccagttcgctgaccagttgcacgagtctcaattggacaaaatgccagcacttccggctaaaggtaacttgaacctccgtgacatcttagagtcggacttcgcgttcgcg

SEQ ID NO: 790 - protein, 890 aa, synthetic construct
  REGION 1..890: note = Variant of RNA polymerase
MHHHHHHMNTINIAKNDFSDIELAAIPFNTLVDHYGEGLAREQLALEHESYEMGETRFRKMFERQLKAGEVADNAAAKPLITTLLPKMIARINDWFEEVKAKRGKRPTAFQFLQEIKPEAVAYITIKTTLACLTSAGRTTVQAVASAIGYAIEDEARFGRIRDLEAKHFLKNVEEQLNKRVGHVYKKAFMQVVEADMLSKGLLGGEAWSSWHKEDSIHVGVRCIEMLIESTGMVSLHRQNAGVVGKDSETIELAPEYAEAIATRAGALAGISPMFQPCVVPPKPWTGITGGGYWANGRRPLALVRTHSKKGLMRYEDVYMPEVYKAINIAQNTAWSINKWVLAVANVITKWKHCPVEDIPAIEREELPMKPEDIDMNPEALTAWKRAKAAVYRKDKARKSRRILLEFMLEQANKFANHKAIWFPYNMDWRGRVYAVSMFNPQGNDMTKGLLTLAKGKPIGKEGYYWLKIHGANCAGVDKVPFPERIKFIEENHENIMACAKSPLENTWWAEQDSPFCFLAFCFEYAGVQHHGLSYNCSLPLAFDGSCSGIQHFSAMLRDEVGGRAVNLLPSETVQDIYGIVAKKVNEILQADAINGTDNEVVTVTDENEGEISEKVKLGTKALAGQWLAYGVTRSVTKRSVMTLAYGSKEFGFRQQVLRWTIQPAIDSGKGLMFTQPNQAAGYMAKLIWESVSVTVVAAVEAMNWLKSAAKLLAAEVKDKKTGEILRKRCAVHWVTPDGFPVWQEYKKPIQTRLNLMFLGQFRLQPTINTNKDSEIDAHKQVSGIAPNFVHSQDGSHLRKTVVWAHEKYGIESFALIHDSFGTIPADAANLFKAVRETMVDTYESCDVLADFYDQFADQLHESQLDKMPALPAKGNLNLRDILESDFAFA

SEQ ID NO: 791 - DNA, 2670 bp, synthetic construct
  misc_feature 1..2670: note = Variant of RNA polymerase
  source 1..2670: mol_type = other DNA
atgcaccatcaccatcaccatatgaacacgattaacatcgctaagaacgacttctctgacatcgaactggctgctatcccgttcaacactctggtcgaccattacggtgagggtttagctcgcgaacagttggcccttgagcatgagtcttacgaaatgggtgaaactcgtttccgcaagatgtttgagcgtcaacttaaagctggtgaggttgcggataacgctgccgccaagcctctcatcactaccctactccctaagatgattgcacgcattaacgactggtttgaggaagtgaaagctaagcgcggcaagcgcccgacagccttccagttcctgcaagaaatcaagccggaagccgtagcgtacatcaccattaagaccactctggcttgcctaaccagtgcggaccgtacaaccgttcaggctgtagcaagcgcaatcggttatgccattgaggacgaggctcgcttcggtcgtatccgtgaccttgaagctaagcacttcctgaaaaacgttgaggaacaactcaacaagcgcgtagggcacgtctacaagaaagcatttatgcaagttgtcgaggctgacatgctctctaagggtctactcggtggcgaggcgtggtcttcgtggcataaggaagactctattcatgtaggagtacgctgcatcgagatgctcattgagtcaaccggaatggttagcttacaccgccaaaatgctggcgtagtaggtaaagactctgagactatcgaactcgcacctgaatacgctgaggctattgcaacccgtgcaggtgcgctggctggcatctctccgatgttccaaccttgcgtagttcctcctaagccgtggactggcattactggtggtggctattgggctaacggtcgtcgtcctctggcgctggtgcgtactcacagtaagaaaggtctgatgcgctacgaagacgtttacatgcctgaggtgtacaaagcgattaacattgcgcaaaacaccgcctggtcgatcaacaagtgggtcctggcggtcgccaacgtaatcaccaagtggaagcattgtccggtcccggacatccctgcgattgagcgtgaagaactcccgatgaaaccggaagacatcgacatgaatcctgaggctctccgtgcgtggaaacgtgctaaagctgctgtgtaccgcaaggacaaggctcgcaagtctcgccgtatcttgcttgagttcatgcttgagcaagccaataagtttgctaaccataaggccatctggttcccttacaacatggactggcgcggtcgtgtttacgctgtgtcaatgttcaacccgcaaggtaacgatatgaccaaaggactgcttacgctggcgaaaggtaaaccaatcggtaaggaaggttactactggctgaaaatccacggtgcaaactgtgcgggtgtcgataaggttccgttccctgagcgcatcaagttcattgaggaaaaccacgagaacatcatggcttgcgctaagtctccactggagaacacttggtgggctgagcaagatagtccgttctgcttccttgcgttctgctttgagtacgctggggtacagcaccacggcctgagctataactgctcccttccgctggcgtttgacgggtcttgctctggcatccagcacttctccgcgatgctccgagatgaggtaggtggtcgcgcggttaacttgcttcctagtgaaaccgttcaggacatctacgggattgttgctaagaaagtcaacgagattctacaagcagacgcaatcaatgggaccgataacgaagtagttaccgtgaccgatgagaacgaaggtgaaatctctgagaaagtcaagctgggcactaaggcactggctggtcaatggctggcatacggtgttactcgcagtgtgactaagcgttcagtcatgacgctggcttacgggtccaaagagttcggcttccgtcaacaagtgctgcgctggactattcagccagctattgattccggccgcggtctgatgttcactcagccgaatcaggctgctggatacatggctaagctgatttgggaatctgtgagcgtgacggtggtagctgcggttgaagcaatgaactggcttaagtctgctgctaagctgctggctgctgaggtcaaagataagaagactggagagattcttcgcaagcgttgcgctgtgcattgggtaactcctgatggtttccctgtgtggcaggaatacaagaagcctattcagacgcgcttgaacctgatgttcctcggtcagttccgcttacagcctaccattaacaccaacaaagatagcgagattgatgcacataaacaggtgtctggtatcgctcctaactttgtacacagccaagacggtagccaccttcgtaagactgtagtgtgggcacacgagaagtacggaatcgaatcttttgcactgattcacgactccttcggtaccattccggctgacgctgcgaacctgttcaaagcagtgcgcgaaactatggttgacacatatgagtcttgtgatgtactggctgatttctacgaccagttcgctgaccagttgcacgagtctcaattggacaaaatgccagcacttccggctaaaggtaacttgaacctccgtgacatcttagagtcggacttcgcgttcgcg

SEQ ID NO: 792 - protein, 890 aa, synthetic construct
  REGION 1..890: note = Variant of RNA polymerase
MHHHHHHMNTINIAKNDFSDIELAAIPFNTLVDHYGEGLAREQLALEHESYEMGETRFRKMFERQLKAGEVADNAAAKPLITTLLPKMIARINDWFEEVKAKRGKRPTAFQFLQEIKPEAVAYITIKTTLACLTSADRTTVQAVASAIGYAIEDEARFGRIRDLEAKHFLKNVEEQLNKRVGHVYKKAFMQVVEADMLSKGLLGGEAWSSWHKEDSIHVGVRCIEMLIESTGMVSLHRQNAGVVGKDSETIELAPEYAEAIATRAGALAGISPMFQPCVVPPKPWTGITGGGYWANGRRPLALVRTHSKKGLMRYEDVYMPEVYKAINIAQNTAWSINKWVLAVANVITKWKHCPVPDIPAIEREELPMKPEDIDMNPEALRAWKRAKAAVYRKDKARKSRRILLEFMLEQANKFANHKAIWFPYNMDWRGRVYAVSMFNPQGNDMTKGLLTLAKGKPIGKEGYYWLKIHGANCAGVDKVPFPERIKFIEENHENIMACAKSPLENTWWAEQDSPFCFLAFCFEYAGVQHHGLSYNCSLPLAFDGSCSGIQHFSAMLRDEVGGRAVNLLPSETVQDIYGIVAKKVNEILQADAINGTDNEVVTVTDENEGEISEKVKLGTKALAGQWLAYGVTRSVTKRSVMTLAYGSKEFGFRQQVLRWTIQPAIDSGRGLMFTQPNQAAGYMAKLIWESVSVTVVAAVEAMNWLKSAAKLLAAEVKDKKTGEILRKRCAVHWVTPDGFPVWQEYKKPIQTRLNLMFLGQFRLQPTINTNKDSEIDAHKQVSGIAPNFVHSQDGSHLRKTVVWAHEKYGIESFALIHDSFGTIPADAANLFKAVRETMVDTYESCDVLADFYDQFADQLHESQLDKMPALPAKGNLNLRDILESDFAFA

SEQ ID NO: 793 - DNA, 2670 bp, synthetic construct
  misc_feature 1..2670: note = Variant of RNA polymerase
  source 1..2670: mol_type = other DNA
atgcaccatcaccatcaccatatgaacacgattaacatcgctaagaacgacttctctgacatcgaactggctgctatcccgttcaacactctggtcgaccattacggtgagggtttagctcgcgaacagttggcccttgagcatgagtcttacgaaatgggtgaaactcgtttccgcaagatgtttgagcgtcaacttaaagctggtgaggttgcggataacgctgccgccaagcctctcatcactaccctactccctaagatgattgcacgcattaacgactggtttgaggaagtgaaagctaagcgcggcaagcgcccgacagccttccagttcctgcaagaaatcaagccggaagccgtagcgtacatcaccattaagaccactctggcttgcctaaccagtgcggaccgtacaaccgttcaggctgtagcaagcgcaatcggttatgccattgaggacgaggctcgcttcggtcgtatccgtgaccttgaagctaagcacttcctgaaaaacgttgaggaacaactcaacaagcgcgtagggcacgtctacaagaaagcatttatgcaagttgtcgaggctgacatgctctctaagggtctactcggtggcgaggcgtggtcttcgtggcataaggaagactctattcatgtaggagtacgctgcatcgagatgctcattgagtcaaccggaatggttagcttacaccgccaaaatgctggcgtagtaggtaaagactctgagactatcgaactcgcacctgaatacgctgaggctattgcaacccgtgcaggtgcgctggctggcatctctccgatgttccaaccttgcgtagttcctcctaagccgtggactggcattactggtggtggctattgggctaacggtcgtcgtcctctggcgctggtgcgtactcacagtaagaaaggtctgatgcgctacgaagacgtttacatgcctgaggtgtacaaagcgattaacattgcgcaaaacaccgcctggtcgatcaacaagtgggtcctggcggtcgccaacgtaatcaccaagtggaagcattgtccggtcgaggacatccctgcgattgagcgtgaagaactgccgatgaaaccggaagacatcgatatgaatcctgaggctctcactgcgtggaaacgtgctcgcgctgctgtttaccgcaaggacaaggcgcgcaagtctcgccgtatcttgcttgagttcatgcttgagcaagccaataagtttgctaaccataaggccatctggttcccttacaacatggactggcgcggtcgtgtttacgctgtgtcaatgttcaacccgcaaggtaacgatatgaccaaaggactgcttacgctggcgaaaggtaaaccaatcggtaaggaaggttactactggctgaaaatccacggtgcaaactgtgcgggtgtcgataaggttccgttccctgagcgcatcaagttcattgaggaaaaccacgagaacatcatggcttgcgctaagtctccactggagaacacttggtgggctgagcaagatagtccgttctgcttccttgcgttctgctttgagtacgctggggtacagcaccacggcctgagctataactgctcccttccgctggcgtttgacgggtcttgctctggcatccagcacttctccgcgatgctccgagatgaggtaggtggtcgcgcggttaacttgcttcctagtgaaaccgttcaggacatctacgggattgttgctaagaaagtcaacgagattctacaagcagacgcaatcaatgggaccgataacgaagtagttaccgtgaccgatgagaacgaaggtgaaatctctgagaaagtcaagctgggcactaaggcactggctggtcaatggctggcatacggtgttactcgcagtgtgactaagcgttcagtcatgacgctggcttacgggtccaaagagttcggcttccgtcaacaagtgctgcgctggactattcagccagctattgattccggccgcggtccgatgttcactcagccgaatcaggctgctggatacatggctaagctgatttgggaatctgtgagcgtgacggtggtagctgcggttgaagcaatgaactggcttaagtctgctgctaagctgctggctgctgaggtcaaagataagaagactggagagattcttcgcaagcgttgcgctgtgcattgggtaactcctgatggtttccctgtgtggcaggaatacaagaagcctattcagacgcgcttgaacctgatgttcctcggtcagttccgcttacagcctaccattaacaccaacaaagatagcgagattgatgcacataaacaggtgtctggtatcgctcctaactttgtacacagccaagacggtagccaccttcgtaagactgtagtgtgggcacacgagaagtacggaatcgaatcttttgcactgattcacgactccttcggtaccattccggctgacgctgcgaacctgttcaaagcagtgcgcgaaactatggttgacacatatgagtcttgtgatgtactggctgatttctacgaccagttcgctgaccagttgcacgagtctcaattggacaaaatgccagcacttccggctaaaggtaacttgaacctccgtgacatcttagagtcggacttcgcgttcgcg

SEQ ID NO: 794 - protein, 890 aa, synthetic construct
  REGION 1..890: note = Variant of RNA polymerase
MHHHHHHMNTINIAKNDFSDIELAAIPFNTLVDHYGEGLAREQLALEHESYEMGETRFRKMFERQLKAGEVADNAAAKPLITTLLPKMIARINDWFEEVKAKRGKRPTAFQFLQEIKPEAVAYITIKTTLACLTSADRTTVQAVASAIGYAIEDEARFGRIRDLEAKHFLKNVEEQLNKRVGHVYKKAFMQVVEADMLSKGLLGGEAWSSWHKEDSIHVGVRCIEMLIESTGMVSLHRQNAGVVGKDSETIELAPEYAEAIATRAGALAGISPMFQPCVVPPKPWTGITGGGYWANGRRPLALVRTHSKKGLMRYEDVYMPEVYKAINIAQNTAWSINKWVLAVANVITKWKHCPVEDIPAIEREELPMKPEDIDMNPEALTAWKRARAAVYRKDKARKSRRILLEFMLEQANKFANHKAIWFPYNMDWRGRVYAVSMFNPQGNDMTKGLLTLAKGKPIGKEGYYWLKIHGANCAGVDKVPFPERIKFIEENHENIMACAKSPLENTWWAEQDSPFCFLAFCFEYAGVQHHGLSYNCSLPLAFDGSCSGIQHFSAMLRDEVGGRAVNLLPSETVQDIYGIVAKKVNEILQADAINGTDNEVVTVTDENEGEISEKVKLGTKALAGQWLAYGVTRSVTKRSVMTLAYGSKEFGFRQQVLRWTIQPAIDSGRGPMFTQPNQAAGYMAKLIWESVSVTVVAAVEAMNWLKSAAKLLAAEVKDKKTGEILRKRCAVHWVTPDGFPVWQEYKKPIQTRLNLMFLGQFRLQPTINTNKDSEIDAHKQVSGIAPNFVHSQDGSHLRKTVVWAHEKYGIESFALIHDSFGTIPADAANLFKAVRETMVDTYESCDVLADFYDQFADQLHESQLDKMPALPAKGNLNLRDILESDFAFA

SEQ ID NO: 795 - DNA, 2670 bp, synthetic construct
  misc_feature 1..2670: note = Variant of RNA polymerase
  source 1..2670: mol_type = other DNA
atgcaccatcaccatcaccatatgaacacgattaacatcgctaagaacgacttctctgacatcgaactggctgctatcccgttcaacactctggtcgaccattacggtgagggtttagctcgcgaacagttggcccttgagcatgagtcttacgaaatgggtgaaactcgtttccgcaagatgtttgagcgtcaacttaaagctggtgaggttgcggataacgctgccgccaagcctctcatcactaccctactccctaagatgattgcacgcattaacgactggtttgaggaagtgaaagctaagcgcggcaagcgcccgacagccttccagttcctgcaagaaatcaagccggaagccgtagcgtacatcaccattaagaccactctggcttgcctaaccagtgcggaccgtacaaccgttcaggctgtagcaagcgcaatcggttatgccattgaggacgaggctcgcttcggtcgtatccgtgaccttgaagctaagcacttcctgaaaaacgttgaggaacaactcaacaagcgcgtagggcacgtctacaagaaagcatttatgcaagttgtcgaggctgacatgctctctaagggtctactcggtggcgaggcgtggtcttcgtggcataaggaagactctattcatgtaggagtacgctgcatcgagatgctcattgagtcaaccggaatggttagcttacaccgccaaaatgctggcgtagtaggtaaagactctgagactatcgaactcgcacctgaatacgctgaggctattgcaacccgtgcaggtgcgctggctggcatctctccgatgttccaaccttgcgtagttcctcctaagccgtggactggcattactggtggtggctattgggctaacggtcgtcgtcctctggcgctggtgcgtactcacagtaagaaaggtctgatgcgctacgaagacgtttacatgcctgaggtgtacaaagcgattaacattgcgcaaaacaccgcctggtcgatcaacaagtgggtcctggcggtcgccaacgtaatcaccaagtggaagcattgtccggtcccggacatccctgcgattgagcgtgaagaactcccgatgaaaccggaagacatcccgatgaatcctgaggctctcaccgcgtggaaacgtgctaaagctgctgtgtaccgcaaggacaaggctcgcaagtctcgccgtatcttgcttgagttcatgcttgagcaagccaataagtttgctaaccataaggccatctggttcccttacaacatggactggcgcggtcgtgtttacgctgtgtcaatgttcaacccgcaaggtaacgatatgaccaaaggactgcttacgctggcgaaaggtaaaccaatcggtaaggaaggttactactggctgaaaatccacggtgcaaactgtgcgggtgtcgataaggttccgttccctgagcgcatcaagttcattgaggaaaaccacgagaacatcatggcttgcgctaagtctccactggagaacacttggtgggctgagcaagatagtccgttctgcttccttgcgttctgctttgagtacgctggggtacagcaccacggcctgagctataactgctcccttccgctggcgtttgacgggtcttgctctggcatccagcacttctccgcgatgctccgagatgaggtaggtggtcgcgcggttaacttgcttcctagtgaaaccgttcaggacatctacgggattgttgctaagaaagtcaacgagattctacaagcagacgcaatcaatgggaccgataacgaagtagttaccgtgaccgatgagaacgaaggtgaaatctctgagaaagtcaagctgggcactaaggcactggctggtcaatggctggcatacggtgttactcgcagtgtgactaagcgttcagtcatgacgctggcttacgggtccaaagagttcggcttccgtcaacaagtgctgcgctggactattcagccagctattgattccggcaagggtctgatgttcactcagccgaatcaggctgctggatacatggctaagctgatttgggaatctgtgagcgtgacggtggtagctgcggttgaagcaatgaactggcttaagtctgctgctaagctgctggctgctgaggtcaaagataagaagactggagagattcttcgcaagcgttgcgctgtgcattgggtaactcctgatggtttccctgtgtggcaggaatacaagaagcctattcagacgcgcttgaacctgatgttcctcggtcagttccgcttacagcctaccattaacaccaacaaagatagcgagattgatgcacataaacaggtgtctggtatcgctcctaactttgtacacagccaagacggtagccaccttcgtaagactgtagtgtgggcacacgagaagtacggaatcgaatcttttgcactgattcacgactccttcggtaccattccggctgacgctgcgaacctgttcaaagcagtgcgcgaaactatggttgacacatatgagtcttgtgatgtactggctgatttctacgaccagttcgctgaccagttgcacgagtctcaattggacaaaatgccagcacttccggctaaaggtaacttgaacctccgtgacatcttagagtcggacttcgcgttcgcg

SEQ ID NO: 796 - protein, 890 aa, synthetic construct
  REGION 1..890: note = Variant of RNA polymerase
MHHHHHHMNTINIAKNDFSDIELAAIPFNTLVDHYGEGLAREQLALEHESYEMGETRFRKMFERQLKAGEVADNAAAKPLITTLLPKMIARINDWFEEVKAKRGKRPTAFQFLQEIKPEAVAYITIKTTLACLTSADRTTVQAVASAIGYAIEDEARFGRIRDLEAKHFLKNVEEQLNKRVGHVYKKAFMQVVEADMLSKGLLGGEAWSSWHKEDSIHVGVRCIEMLIESTGMVSLHRQNAGVVGKDSETIELAPEYAEAIATRAGALAGISPMFQPCVVPPKPWTGITGGGYWANGRRPLALVRTHSKKGLMRYEDVYMPEVYKAINIAQNTAWSINKWVLAVANVITKWKHCPVPDIPAIEREELPMKPEDIPMNPEALTAWKRAKAAVYRKDKARKSRRILLEFMLEQANKFANHKAIWFPYNMDWRGRVYAVSMFNPQGNDMTKGLLTLAKGKPIGKEGYYWLKIHGANCAGVDKVPFPERIKFIEENHENIMACAKSPLENTWWAEQDSPFCFLAFCFEYAGVQHHGLSYNCSLPLAFDGSCSGIQHFSAMLRDEVGGRAVNLLPSETVQDIYGIVAKKVNEILQADAINGTDNEVVTVTDENEGEISEKVKLGTKALAGQWLAYGVTRSVTKRSVMTLAYGSKEFGFRQQVLRWTIQPAIDSGKGLMFTQPNQAAGYMAKLIWESVSVTVVAAVEAMNWLKSAAKLLAAEVKDKKTGEILRKRCAVHWVTPDGFPVWQEYKKPIQTRLNLMFLGQFRLQPTINTNKDSEIDAHKQVSGIAPNFVHSQDGSHLRKTVVWAHEKYGIESFALIHDSFGTIPADAANLFKAVRETMVDTYESCDVLADFYDQFADQLHESQLDKMPALPAKGNLNLRDILESDFAFA

SEQ ID NO: 797 - DNA, 2670 bp, synthetic construct
  misc_feature 1..2670: note = Variant of RNA polymerase
  source 1..2670: mol_type = other DNA
atgcaccatcaccatcaccatatgaacacgattaacatcgctaagaacgacttctctgacatcgaactggctgctatcccgttcaacactctggtcgaccattacggtgagggtttagctcgcgaacagttggcccttgagcatgagtcttacgaaatgggtgaaactcgtttccgcaagatgtttgagcgtcaacttaaagctggtgaggttgcggataacgctgccgccaagcctctcatcactaccctactccctaagatgattgcacgcattaacgactggtttgaggaagtgaaagctaagcgcggcaagcgcccgacagccttccagttcctgcaagaaatcaagccggaagccgtagcgtacatcaccattaagaccactctggcttgcctaaccagtgcggaccgtacaaccgttcaggctgtagcaagcgcaatcggttatgccattgaggacgaggctcgcttcggtcgtatccgtgaccttgaagctaagcacttcctgaaaaacgttgaggaacaactcaacaagcgcgtagggcacgtctacaagaaagcatttatgcaagttgtcgaggctgacatgctctctaagggtctactcggtggcgaggcgtggtcttcgtggcataaggaagactctattcatgtaggagtacgctgcatcgagatgctcattgagtcaaccggaatggttagcttacaccgccaaaatgctggcgtagtaggtaaagactctgagactatcgaactcgcacctgaatacgctgaggctattgcaacccgtgcaggtgcgctggctggcatctctccgatgttccaaccttgcgtagttcctcctaagccgtggactggcattactggtggtggctattgggctaacggtcgtcgtcctctggcgctggtgcgtactcacagtaagaaaggtctgatgcgctacgaagacgtttacatgcctgaggtgtacaaagcgattaacattgcgcaaaacaccgcctggtcgatcaacaagtgggtcctggcggtcgccaacgtaatcaccaagtggaagcattgtccggtcccggacatccctgcgattgagcgtgaagaactcccgatgaaaccggaagacatcgacatgaatcctgaggctctcactgcgtggaaacgtgctaaagctgctgtgtaccgcaaggacaaggctcgcaagtctcgccgtatcttgcttgagttcatgcttgagcaagccaataagtttgctaaccataaggccatctggttcccttacaacatggactggcgcggtcgtgtttacgctgtgtcaatgttcaacccgcaaggtaacgatatgaccaaaggactgcttacgctggcgaaaggtaaaccaatcggtaaggaaggttactactggctgaaaatccacggtgcaaactgtgcgggtgtcgataaggttccgttccctgagcgcatcaagttcattgaggaaaaccacgagaacatcatggcttgcgctaagtctccactggagaacacttggtgggctgagcaagatagtccgttctgcttccttgcgttctgctttgagtacgctggggtacagcaccacggcctgagctataactgctcccttccgctggcgtttgacgggtcttgctctggcatccagcacttctccgcgatgctccgagatgaggtaggtggtcgcgcggttaacttgcttcctagtgaaaccgttcaggacatctacgggattgttgctaagaaagtcaacgagattctacaagcagacgcaatcaatgggaccgataacgaagtagttaccgtgaccgatgagaacgaaggtgaaatctctgagaaagtcaagctgggcactaaggcactggctggtcaatggctggcatacggtgttactcgcagtgtgactaagcgttcagtcatgacgctggcttacgggtccaaagagttcggcttccgtcaacaagtgctgcgctggactattcagccagctattgattccggcaaaggtggcatgttcactcagccgaatcaggctgctggatacatggctaagctgatttgggaatctgtgagcgtgacggtggtagctgcggttgaagcaatgaactggcttaagtctgctgctaagctgctggctgctgaggtcaaagataagaagactggagagattcttcgcaagcgttgcgctgtgcattgggtaactcctgatggtttccctgtgtggcaggaatacaagaagcctattcagacgcgcttgaacctgatgttcctcggtcagttccgcttacagcctaccattaacaccaacaaagatagcgagattgatgcacataaacaggtgtctggtatcgctcctaactttgtacacagccaagacggtagccaccttcgtaagactgtagtgtgggcacacgagaagtacggaatcgaatcttttgcactgattcacgactccttcggtaccattccggctgacgctgcgaacctgttcaaagcagtgcgcgaaactatggttgacacatatgagtcttgtgatgtactggctgatttctacgaccagttcgctgaccagttgcacgagtctcaattggacaaaatgccagcacttccggctaaaggtaacttgaacctccgtgacatcttagagtcggacttcgcgttcgcg

SEQ ID NO: 798 - protein, 890 aa, synthetic construct
  REGION 1..890: note = Variant of RNA polymerase
MHHHHHHMNTINIAKNDFSDIELAAIPFNTLVDHYGEGLAREQLALEHESYEMGETRFRKMFERQLKAGEVADNAAAKPLITTLLPKMIARINDWFEEVKAKRGKRPTAFQFLQEIKPEAVAYITIKTTLACLTSADRTTVQAVASAIGYAIEDEARFGRIRDLEAKHFLKNVEEQLNKRVGHVYKKAFMQVVEADMLSKGLLGGEAWSSWHKEDSIHVGVRCIEMLIESTGMVSLHRQNAGVVGKDSETIELAPEYAEAIATRAGALAGISPMFQPCVVPPKPWTGITGGGYWANGRRPLALVRTHSKKGLMRYEDVYMPEVYKAINIAQNTAWSINKWVLAVANVITKWKHCPVPDIPAIEREELPMKPEDIDMNPEALTAWKRAKAAVYRKDKARKSRRILLEFMLEQANKFANHKAIWFPYNMDWRGRVYAVSMFNPQGNDMTKGLLTLAKGKPIGKEGYYWLKIHGANCAGVDKVPFPERIKFIEENHENIMACAKSPLENTWWAEQDSPFCFLAFCFEYAGVQHHGLSYNCSLPLAFDGSCSGIQHFSAMLRDEVGGRAVNLLPSETVQDIYGIVAKKVNEILQADAINGTDNEVVTVTDENEGEISEKVKLGTKALAGQWLAYGVTRSVTKRSVMTLAYGSKEFGFRQQVLRWTIQPAIDSGKGGMFTQPNQAAGYMAKLIWESVSVTVVAAVEAMNWLKSAAKLLAAEVKDKKTGEILRKRCAVHWVTPDGFPVWQEYKKPIQTRLNLMFLGQFRLQPTINTNKDSEIDAHKQVSGIAPNFVHSQDGSHLRKTVVWAHEKYGIESFALIHDSFGTIPADAANLFKAVRETMVDTYESCDVLADFYDQFADQLHESQLDKMPALPAKGNLNLRDILESDFAFA

SEQ ID NO: 799 - DNA, 2670 bp, synthetic construct
  misc_feature 1..2670: note = Variant of RNA polymerase
  source 1..2670: mol_type = other DNA
atgcaccatcaccatcaccatatgaacacgattaacatcgctaagaacgacttctctgacatcgaactggctgctatcccgttcaacactctggtcgaccattacggtgagggtttagctcgcgaacagttggcccttgagcatgagtcttacgaaatgggtgaaactcgtttccgcaagatgtttgagcgtcaacttaaagctggtgaggttgcggataacgctgccgccaagcctctcatcactaccctactccctaagatgattgcacgcattaacgactggtttgaggaagtgaaagctaagcgcggcaagcgcccgacagccttccagttcctgcaagaaatcaagccggaagccgtagcgtacatcaccattaagaccactctggcttgcctaaccagtgcggaccgtacaaccgttcaggctgtagcaagcgcaatcggttatgccattgaggacgaggctcgcttcggtcgtatccgtgaccttgaagctaagcacttcctgaaaaacgttgaggaacaactcaacaaacgcgtagggcacgtctacaagaaagcatttatgcaagttgtcgaggctgacatgctctctaagggtctactcggtggcgaggcgtggtcttcgtggcataaggaagactctattcatgtaggagtacgctgcatcgagatgctcattgagtcaaccggaatggttagcttacaccgccaaaatgctggcgtagtaggtaaagactctgagactatcgaactcgcacctgaatacgctgaggctattgcaacccgtgcaggtgcgctggctggcatctctccgatgttccaaccttgcgtagttcctcctaagccgtggactggcattactggtggtggctattgggctaacggtcgtcgtcctctggcgctggtgcgtactcacagtaagaaaggtctgatgcgctacgaagacgtttacatgcctgaggtgtacaaagcgattaacattgcgcaaaacaccgcctggtcgatcaacaagtgggtcctggcggtcgccaacgtaatcaccaagtggaagcattgtccggtcgaggacatccctgcgattgagcgtgaagaactcccgatgaaaccggaagacatcgacatgaatcctgaggctctcaccgcgtggaaacgtgctaaagctgctgtgtaccgcaaggacaaggctcgcaagtctcgccgtatcttgcttgagttcatgcttgagcaagccaataagtttgctaaccataaggccatctggttcccttacaacatggactggcgcggtcgtgtttacgctgtgtcaatgttcaacccgcaaggtaacgatatgaccaaaggactgcttacgctggcgaaaggtaaaccaatcggtaaggaaggttactactggctgaaaatccacggtgcaaactgtgcgggtgtcgataaggttccgttccctgagcgcatcaagttcattgaggaaaaccacgagaacatcatggcttgcgctaagtctccactggagaacacttggtgggctgagcaagatagtccgttctgcttccttgcgttctgctttgagtacgctggggtacagcaccacggcctgagctataactgctcccttccgctggcgtttgacgggtcttgctctggcatccagcacttctccgcgatgctccgagatgaggtaggtggtcgcgcggttaacttgcttcctagtgaaaccgttcaggacatctacgggattgttgctaagaaagtcaacgagattctacaagcagacgcaatcaatgggaccgataacgaagtagttaccgtgaccgatgagaacgaaggtgaaatctctgagaaagtaaagctgggcactaaggcactggctggtcaatggctgaagtacggtgttactcgcagtgtgactaagcgttcagtcatgacgctggcttacgggtccaaagagttcggcttccgtcaacaagtgctgcgctggactattcagccagctattgattccggcaagggtctgatgttcactcagccgaatcaggctgctggatacatggctaagctgatttgggagtctgtgagcgtgacggtggtagctgcggttgaagcaatgaactggcttaagtctgctgctaagctgctggctgctgaggtcaaagataagaagactggagagattcttcgcaagcgttgcgctgtgcattgggtaactcctgatggtttccctgtgtggcaggaatacaagaagcctattcagacgcgcttgaacctgatgttcctcggtcagttccgcttacagcctaccattaacaccaacaaagatagcgagattgatgcacataaacaggtgtctggtatcgctcctaactttgtacacagccaagacggtagccaccttcgtaagactgtagtgtgggcacacgagaagtacggaatcgaatcttttgcactgattcacgactccttcggtaccattccggctgacgctgcgaacctgttcaaagcagtgcgcgaaactatggttgacacatatgagtcttgtgatgtactggctgatttctacgaccagttcgctgaccagttgcacgagtctcaattggacaaaatgccagcacttccggctaaaggtaacttgaacctccgtgacatcttagagtcggacttcgcgttcgcg

SEQ ID NO: 800 - protein, 890 aa, synthetic construct
  REGION 1..890: note = Variant of RNA polymerase
MHHHHHHMNTINIAKNDFSDIELAAIPFNTLVDHYGEGLAREQLALEHESYEMGETRFRKMFERQLKAGEVADNAAAKPLITTLLPKMIARINDWFEEVKAKRGKRPTAFQFLQEIKPEAVAYITIKTTLACLTSADRTTVQAVASAIGYAIEDEARFGRIRDLEAKHFLKNVEEQLNKRVGHVYKKAFMQVVEADMLSKGLLGGEAWSSWHKEDSIHVGVRCIEMLIESTGMVSLHRQNAGVVGKDSETIELAPEYAEAIATRAGALAGISPMFQPCVVPPKPWTGITGGGYWANGRRPLALVRTHSKKGLMRYEDVYMPEVYKAINIAQNTAWSINKWVLAVANVITKWKHCPVEDIPAIEREELPMKPEDIDMNPEALTAWKRAKAAVYRKDKARKSRRILLEFMLEQANKFANHKAIWFPYNMDWRGRVYAVSMFNPQGNDMTKGLLTLAKGKPIGKEGYYWLKIHGANCAGVDKVPFPERIKFIEENHENIMACAKSPLENTWWAEQDSPFCFLAFCFEYAGVQHHGLSYNCSLPLAFDGSCSGIQHFSAMLRDEVGGRAVNLLPSETVQDIYGIVAKKVNEILQADAINGTDNEVVTVTDENEGEISEKVKLGTKALAGQWLKYGVTRSVTKRSVMTLAYGSKEFGFRQQVLRWTIQPAIDSGKGLMFTQPNQAAGYMAKLIWESVSVTVVAAVEAMNWLKSAAKLLAAEVKDKKTGEILRKRCAVHWVTPDGFPVWQEYKKPIQTRLNLMFLGQFRLQPTINTNKDSEIDAHKQVSGIAPNFVHSQDGSHLRKTVVWAHEKYGIESFALIHDSFGTIPADAANLFKAVRETMVDTYESCDVLADFYDQFADQLHESQLDKMPALPAKGNLNLRDILESDFAFA

SEQ ID NO: 801 - DNA, 2670 bp, synthetic construct
  misc_feature 1..2670: note = Variant of RNA polymerase
  source 1..2670: mol_type = other DNA
atgcaccatcaccatcaccatatgaacacgattaacatcgctaagaacgacttctctgacatcgaactggctgctatcccgttcaacactctggtcgaccattacggtgagggtttagctcgcgaacagttggcccttgagcatgagtcttacgaaatgggtgaaactcgtttccgcaagatgtttgagcgtcaacttaaagctggtgaggttgcggataacgctgccgccaagcctctcatcactaccctactccctaagatgattgcacgcattaacgactggtttgaggaagtgaaagctaagcgcggcaagcgcccgacagccttccagttcctgcaagaaatcaagccggaagccgtagcgtacatcaccattaagaccactctggcttgcctaaccagtgcggaccgtacaaccgttcaggctgtagcaagcgcaatcggttatgccattgaggacgaggctcgcttcggtcgtatccgtgaccttgaagctaagcacttcctgaaaaacgttgaggaacaactcaacaagcgcgtagggcacgtctacaagaaagcatttatgcaagttgtcgaggctgacatgctctctaagggtctactcggtggcgaggcgtggtcttcgtggcataaggaagactctattcatgtaggagtacgctgcatcgagatgctcattgagtcaaccggaatggttagcttacaccgccaaaatgctggcgtagtaggtaaagactctgagactatcgaactcgcacctgaatacgctgaggctattgcaacccgtgcaggtgcgctggctggcatctctccgatgttccaaccttgcgtagttcctcctaagccgtggactggcattactggtggtggctattgggctaacggtcgtcgtcctctggcgctggtgcgtactcacagtaagaaaggtctgatgcgctacgaagacgtttacatgcctgaggtgtacaaagcgattaacattgcgcaaaacaccgcctggtcgatcaacaagtgggtcctggcggtcgccaacgtaatcaccaagtggaagcattgtccggtcgaagacatccctgcgattgagcgtgaagaactcccgatgaaaccggaagacatcgatatgaatcctgaggctctcactgcgtggaaacgtgctaaagctgctgtgtaccgcaaggacaaggcgcgcaagtctcgccgtatcttgcttgagttcatgcttgagcaagccaataagtttgctaaccataaggccatctggttcccttacaacatggactggcgcggtcgtgtttacgctgtgtcaatgttcaacccgcaaggtaacgatatgaccaaaggactgcttacgctggcgaaaggtaaaccaatcggtaaggaaggttactactggctgaaaatccacggtgcaaactgtgcgggtgtcgataaggttccgttccctgagcgcatcaagttcattgaggaaaaccacgagaacatcatggcttgcgctaagtctccactggagaacacttggtgggctgagcaagatagtccgttctgcttccttgcgttctgctttgagtacgctggggtacagcaccacggcctgagctataactgctcccttccgctggcgtttgacgggtcttgctctggcatccagcacttctccgcgatgctccgagatgaggtaggtggtcgcgcggttaacttgcttcctagtgaaaccgttcaggacatctacgggattgttgctaagaaagtcaacgagattctacaagcagacgcaatcaatgggaccgataacgaagtagttaccgtgaccgatgagaacgaaggtgaaatctctgagaaagtcaagctgggcactaaggcactggctggtcaatggctggcatacggtgttactcgcagtgtgactaagcgttcagtcatgacgctggcttacgggtccaaagagttcggcttccgtcgccaagtgctgcgctggactattcagccagctattgattccggccgcggtctgatgttcactcagccgaatcaggctgctggatacatggctaagctgatttgggaatctgtgagcgtgacggtggtagctgcggttgaagcaatgaactggcttaagtctgctgctaagctgctggctgctgaggtcaaagataagaagactggagagattcttcgcaagcgttgcgctgtgcattgggtaactcctgatggtttccctgtgtggcaggaatacaagaagcctattcagacgcgcttgaacctgatgttcctcggtcagttccgcttacagcctaccattaacaccaacaaagatagcgagattgatgcacataaacaggtgtctggtatcgctcctaactttgtacacagccaagacggtagccaccttcgtaagactgtagtgtgggcacacgagaagtacggaatcgaatcttttgcactgattcacgactccttcggtaccattccggctgacgctgcgaacctgttcaaagcagtgcgcgaaactatggttgacacatatgagtcttgtgatgtactggctgatttctacgaccagttcgctgaccagttgcacgagtctcaattggacaaaatgccagcacttccggctaaaggtaacttgaacctccgtgacatcttagagtcggacttcgcgttcgcg

SEQ ID NO: 802 - protein, 890 aa, synthetic construct
  REGION 1..890: note = Variant of RNA polymerase
MHHHHHHMNTINIAKNDFSDIELAAIPFNTLVDHYGEGLAREQLALEHESYEMGETRFRKMFERQLKAGEVADNAAAKPLITTLLPKMIARINDWFEEVKAKRGKRPTAFQFLQEIKPEAVAYITIKTTLACLTSADRTTVQAVASAIGYAIEDEARFGRIRDLEAKHFLKNVEEQLNKRVGHVYKKAFMQVVEADMLSKGLLGGEAWSSWHKEDSIHVGVRCIEMLIESTGMVSLHRQNAGVVGKDSETIELAPEYAEAIATRAGALAGISPMFQPCVVPPKPWTGITGGGYWANGRRPLALVRTHSKKGLMRYEDVYMPEVYKAINIAQNTAWSINKWVLAVANVITKWKHCPVEDIPAIEREELPMKPEDIDMNPEALTAWKRAKAAVYRKDKARKSRRILLEFMLEQANKFANHKAIWFPYNMDWRGRVYAVSMFNPQGNDMTKGLLTLAKGKPIGKEGYYWLKIHGANCAGVDKVPFPERIKFIEENHENIMACAKSPLENTWWAEQDSPFCFLAFCFEYAGVQHHGLSYNCSLPLAFDGSCSGIQHFSAMLRDEVGGRAVNLLPSETVQDIYGIVAKKVNEILQADAINGTDNEVVTVTDENEGEISEKVKLGTKALAGQWLAYGVTRSVTKRSVMTLAYGSKEFGFRRQVLRWTIQPAIDSGRGLMFTQPNQAAGYMAKLIWESVSVTVVAAVEAMNWLKSAAKLLAAEVKDKKTGEILRKRCAVHWVTPDGFPVWQEYKKPIQTRLNLMFLGQFRLQPTINTNKDSEIDAHKQVSGIAPNFVHSQDGSHLRKTVVWAHEKYGIESFALIHDSFGTIPADAANLFKAVRETMVDTYESCDVLADFYDQFADQLHESQLDKMPALPAKGNLNLRDILESDFAFA

SEQ ID NO: 803 - DNA, 2670 bp, synthetic construct
  misc_feature 1..2670: note = Variant of RNA polymerase
  source 1..2670: mol_type = other DNA
atgcaccatcaccatcaccatatgaacacgattaacatcgctaagaacgacttctctgacatcgaactggctgctatcccgttcaacactctggtcgaccattacggtgagggtttagctcgcgaacagttggcccttgagcatgagtcttacgaaatgggtgaaactcgtttccgcaagatgtttgagcgtcaacttaaagctggtgaggttgcggataacgctgccgccaagcctctcatcactaccctactccctaagatgattgcacgcattaacgactggtttgaggaagtgaaagctaagcgcggcaagcgcccgacagccttccagttcctgcaagaaatcaagccggaagccgtagcgtacatcaccattaagaccactctggcttgcctaaccagtgcgggccgtacaaccgttcaggctgtagcaagcgcaatcggttatgccattgaggacgaggctcgcttcggtcgtatccgtgaccttgaagctaagcacttcctgaaaaacgttgaggaacaactcaacaaacgcgtagggcacgtctacaagaaagcatttatgcaagttgtcgaggctgacatgctctctaagggtctactcggtggcgaggcgtggtcttcgtggcataaggaagactctattcatgtaggagtacgctgcatcgagatgctcattgagtcaaccggaatggttagcttacaccgccaaaatgctggcgtagtaggtaaggactctgagactatcgaactcgcacctgaatacgctgaggctattgcaacccgtgcaggtgcgctggctggcatctctccgatgttccaaccttgcgtagttcctcctaagccgtggactggcattactggtggtggctattgggctaacggtcgtcgtcctctggcgctggtgcgtactcacagtaagaaaggtctgatgcgctacgaagacgtttacatgcctgaggtgtacaaagcgattaacattgcgcaaaacaccgcctggtcgatcaacaagtgggtcctggcggtcgccaacgtaatcaccaagtggaagcattgtccggtcgaggacatccctgcgattgagcgtgaagaactcccgatgaaaccggaagacatcgacatgaatcctgaggctctcaccgcgtggaaacgtgctaaagctgctgtgtaccgcaaggacaaggctcgcaagtctcgccgtatcttgcttgagttcatgcttgagcaagccaataagtttgctaaccataaggccatctggttcccttacaacatggactggcgcggtcgtgtttacgctgtgtcaatgttcaacccgcaaggtaacgatatgaccaaaggactgcttacgctggcgaaaggtaaaccaatcggtaaggaaggttactactggctgaaaatccacggtgcaaactgtgcgggtgtcgataaggttccgttccctgagcgcatcaagttcattgaggaaaaccacgagaacatcatggcttgcgctaagtctccactggagaacacttggtgggctgagcaagatagtccgttctgcttccttgcgttctgctttgagtacgctggggtacagcaccacggcctgagctataactgctcccttccgctggcgtttgacgggtcttgctctggcatccagcacttctccgcgatgctccgagatgaggtaggtggtcgcgcggttaacttgcttcctagtgaaaccgttcaggacatctacgggattgttgctaagaaagtcaacgagattctacaagcagacgcaatcaatgggaccgataacgaagtagttaccgtgaccgatgagaacgaaggtgaaatctctgagaaagtaaagctgggcactaaggcactggctggtcaatggctgaagtacggtgttactcgcagtgtgactaagcgttcagtcatgacgctggcttacgggtccaaagagttcggcttccgtcaacaagtgctgcgctggactattcagccagctattgattccggcaagggtctgatgttcactcagccgaatcaggctgctggatacatggctaagctgatttgggagtctgtgagcgtgacggtggtagctgcggttgaagcaatgaactggcttaagtctgctgctaagctgctggctgctgaggtcaaagataagaagactggagagattcttcgcaagcgttgcgctgtgcattgggtaactcctgatggtttccctgtgtggcaggaatacaagaagcctattcagacgcgcttgaacctgatgttcctcggtcagttccgcttacagcctaccattaacaccaacaaagatagcgagattgatgcacataaacaggtatctggtatcgctcctaactttgtacacagccaagacggtagccaccttcgtaagactgtagtgtgggcacacgagaagtacggaatcgaatcttttgcactgattcacgactccttcggtaccattccggctgacgctgcgaacctgttcaaagcagtgcgcgaaactatggttgacacatatgagtcttgtgatgtactggctgatttctacgaccagttcgctgaccagttgcacgagtctcaattggacaaaatgccagcacttccggctaaaggtaacttgaacctccgtgacatcttagagtcggacttcgcgttcgcg

SEQ ID NO: 804 - protein, 890 aa, synthetic construct
  REGION 1..890: note = Variant of RNA polymerase
MHHHHHHMNTINIAKNDFSDIELAAIPFNTLVDHYGEGLAREQLALEHESYEMGETRFRKMFERQLKAGEVADNAAAKPLITTLLPKMIARINDWFEEVKAKRGKRPTAFQFLQEIKPEAVAYITIKTTLACLTSAGRTTVQAVASAIGYAIEDEARFGRIRDLEAKHFLKNVEEQLNKRVGHVYKKAFMQVVEADMLSKGLLGGEAWSSWHKEDSIHVGVRCIEMLIESTGMVSLHRQNAGVVGKDSETIELAPEYAEAIATRAGALAGISPMFQPCVVPPKPWTGITGGGYWANGRRPLALVRTHSKKGLMRYEDVYMPEVYKAINIAQNTAWSINKWVLAVANVITKWKHCPVEDIPAIEREELPMKPEDIDMNPEALTAWKRAKAAVYRKDKARKSRRILLEFMLEQANKFANHKAIWFPYNMDWRGRVYAVSMFNPQGNDMTKGLLTLAKGKPIGKEGYYWLKIHGANCAGVDKVPFPERIKFIEENHENIMACAKSPLENTWWAEQDSPFCFLAFCFEYAGVQHHGLSYNCSLPLAFDGSCSGIQHFSAMLRDEVGGRAVNLLPSETVQDIYGIVAKKVNEILQADAINGTDNEVVTVTDENEGEISEKVKLGTKALAGQWLKYGVTRSVTKRSVMTLAYGSKEFGFRQQVLRWTIQPAIDSGKGLMFTQPNQAAGYMAKLIWESVSVTVVAAVEAMNWLKSAAKLLAAEVKDKKTGEILRKRCAVHWVTPDGFPVWQEYKKPIQTRLNLMFLGQFRLQPTINTNKDSEIDAHKQVSGIAPNFVHSQDGSHLRKTVVWAHEKYGIESFALIHDSFGTIPADAANLFKAVRETMVDTYESCDVLADFYDQFADQLHESQLDKMPALPAKGNLNLRDILESDFAFA

SEQ ID NO: 805 - DNA, 2670 bp, synthetic construct
  misc_feature 1..2670: note = Variant of RNA polymerase
  source 1..2670: mol_type = other DNA
atgcaccatcaccatcaccatatgaacacgattaacatcgctaagaacgacttctctgacatcgaactggctgctatcccgttcaacactctggtcgaccattacggtgagggtttagctcgcgaacagttggcccttgagcatgagtcttacgaaatgggtgaagaacgtttccgcaagatgtttgagcgtcaacttaaagctggtgaggttgcggataacgctgccgccaagcctctcatcactaccctactccctaagatgattgcacgcattaacgactggtttgaggaagtgaaagctaagcgcggcaagcgcccgacagccttccagttcctgcaagaaatcaagccggaagccgtagcgtacatcaccattaagaccactctggcttgcctaaccagtgcggaccgtacaaccgttcaggcggtagcaagcgcaatcggttatgccattgaggacgaggctcgcttcggtcgtatccgtgaccttgaagctaagcacttcctgaaaaacgttgaggaacaactcaacaaacgcgtagggcacgtctacaagaaagcatttatgcaagttgtcgaggctgacatgctctctaagggtctactcggtggcgaggcgtggtcttcgtggcataaggaagactctattcatgtaggagtacgctgcatcgagatgctcattgagtcaaccggaatggttagcttacaccgccaaaatgctggcgtagtaggtaaagactctgagactatcgaactcgcacctgaatacgctgaggctattgcaacccgtgcaggtgcgctggctggcatctctccgatgttccaaccttgcgtagttcctcctaagccgtggactggcattactggtggtggctattgggctaacggtcgtcgtcctctggcgctggtgcgtactcacagtaagaaagcgctgatgcgctacgaagacgtttacatgcctgaggtgtacaaagcgattaacattgcgcaaaacaccgcctggtcgatcaacaagtgggtcctggcggtcgccaacgtaatcaccaagtggaagcattgtccggtcgaggacatccctgcgattgagcgtgaagaactcccgatgaaaccggaagacatcgacatgaatcctgaggctctccgtgcgtggaaacgtgctaaagctgctgtgtaccgcaaggacaaggctcgcaagtctcgccgtatcttgcttgagttcatgcttgagcaagccaataagtttgctaaccataaggccatctggttcccttacaacatggactggcgcggtcgtgtttacgctgtgtcaatgttcaacccgcaaggtaacgatatgaccaaaggactgcttacgctggcgaaaggtaaaccaatcggtaaggaaggttactactggctgaaaatccacggtgcaaactgtgcgggtgtcgataaggttccgttccctgagcgcatcaagttcattgaggaaaaccacgagaacatcatggcttgcgctaagtctccactggagaacacttggtgggctgagcaagatagtccgttctgcttccttgcgttctgctttgagtacgctggggtacagcaccacggcctgagctataactgctcccttccgctggcgtttgacgggtcttgctctggcatccagcacttctccgcgatgctccgagatgaggtaggtggtcgcgcggttaacttgcttcctagtgaaaccgttcaggacatctacgggattgttgctaagaaagtcaacgagattctacaagcagacgcaatcaatgggaccgataacgaagtagttaccgtgaccgatgagaacgaaggtgaaatctctgagaaagtaaagctgggcactaaggcactggctggtcaatggctgaagtacggtgttactcgcagtgtgactaagcgttcagtcatgacgctggcttacgggtccaaagagttcggcttccgtcaacaagtgctgcgctggactattcagccagctattgattccggcaagggtctgatgttcactcagccgaatcaggctgctggatacatggctaagctgatttgggagtctgtgagcgtgacggtggtagctgcggttgaagcaatgaactggcttaagtctgctgctaagctgctggctgctgaggtcaaagataagaagactggagagattcttcgcaagcgttgcgctgtgcattgggtaactcctgatggtttccctgtgtggcaggaatacaagaagcctattcagacgcgcttgaacctgatgttcctcggtcagttccgcttacagcctaccattaacaccaacaaagatagcgagattgatgcacataaacaggtatctggtatcgctcctaactttgtacacagccaagacggtagccaccttcgtaagactgtagtgtgggcacacgagaagtacggaatcgaatcttttgcactgattcacgactccttcggtaccattccggctgacgctgcgaacctgttcaaagcagtgcgcgaaactatggttgacacatatgagtcttgtgatgtactggctgatttctacgaccagttcgctgaccagttgcacgagtctcaattggacaaaatgccagcacttccggctaaaggtaacttgaacctccgtgacatcttagagtcggacttcgcgttcgcg

SEQ ID NO: 806 - protein, 890 aa, synthetic construct
  REGION 1..890: note = Variant of RNA polymerase
MHHHHHHMNTINIAKNDFSDIELAAIPFNTLVDHYGEGLAREQLALEHESYEMGEERFRKMFERQLKAGEVADNAAAKPLITTLLPKMIARINDWFEEVKAKRGKRPTAFQFLQEIKPEAVAYITIKTTLACLTSADRTTVQAVASAIGYAIEDEARFGRIRDLEAKHFLKNVEEQLNKRVGHVYKKAFMQVVEADMLSKGLLGGEAWSSWHKEDSIHVGVRCIEMLIESTGMVSLHRQNAGVVGKDSETIELAPEYAEAIATRAGALAGISPMFQPCVVPPKPWTGITGGGYWANGRRPLALVRTHSKKALMRYEDVYMPEVYKAINIAQNTAWSINKWVLAVANVITKWKHCPVEDIPAIEREELPMKPEDIDMNPEALRAWKRAKAAVYRKDKARKSRRILLEFMLEQANKFANHKAIWFPYNMDWRGRVYAVSMFNPQGNDMTKGLLTLAKGKPIGKEGYYWLKIHGANCAGVDKVPFPERIKFIEENHENIMACAKSPLENTWWAEQDSPFCFLAFCFEYAGVQHHGLSYNCSLPLAFDGSCSGIQHFSAMLRDEVGGRAVNLLPSETVQDIYGIVAKKVNEILQADAINGTDNEVVTVTDENEGEISEKVKLGTKALAGQWLKYGVTRSVTKRSVMTLAYGSKEFGFRQQVLRWTIQPAIDSGKGLMFTQPNQAAGYMAKLIWESVSVTVVAAVEAMNWLKSAAKLLAAEVKDKKTGEILRKRCAVHWVTPDGFPVWQEYKKPIQTRLNLMFLGQFRLQPTINTNKDSEIDAHKQVSGIAPNFVHSQDGSHLRKTVVWAHEKYGIESFALIHDSFGTIPADAANLFKAVRETMVDTYESCDVLADFYDQFADQLHESQLDKMPALPAKGNLNLRDILESDFAFA

SEQ ID NO: 807 - DNA, 2670 bp, synthetic construct
  misc_feature 1..2670: note = Variant of RNA polymerase
  source 1..2670: mol_type = other DNA
atgcaccatcaccatcaccatatgaacacgattaacatcgctaagaacgacttctctgacatcgaactggctgctatcccgttcaacactctggtcgaccattacggtgagggtttagctcgcgaacagttggcccttgagcatgagtcttacgaaatgggtgaagaacgtttccgcaagatgtttgagcgtcaacttaaagctggtgaggttgcggataacgctgccgccaagcctctcatcactaccctactccctaagatgattgcacgcattaacgactggtttgaggaagtgaaagctaagcgcggcaagcgcccgacagccttccagttcctgcaagaaatcaagccggaagccgtagcgtacatcaccattaagaccactctggcttgcctaaccagtgcgggccgtacaaccgttcagaacgtagcaagcgcaatcggttatgccattgaggacgaggctcgcttcggtcgtatccgtgaccttgaagctaagcacttcctgaaaaacgttgaggaacaactcaacaaacgcgtagggcacgtctacaagaaagcatttatgcaagttgtcgaggctgacatgctctctaagggtctactcggtggcgaggcgtggtcttcgtggcataaggaagactctattcatgtaggagtacgctgcatcgagatgctcattgagtcaaccggaatggttagcttacaccgccaaaatgctggcgtagtaggtaaagactctgagactatcgaactcgcacctgaatacgctgaggctattgcaacccgtgcaggtgcgctggctggcatctctccgatgttccaaccttgcgtagttcctcctaagccgtggactggcattactggtggtggctattgggctaacggtcgtcgtcctctggcgctggtgcgtactcacagtaagaaaggtctgatgcgctacgaagacgtttacatgcctgaggtgtacaaagcgattaacattgcgcaaaacaccgcctggtcgatcaacaagtgggtcctggcggtcgccaacgtaatcaccaagtggaagcattgtccggtcgaggacatccctgcgattgagcgtgaagaactcccgatgaaaccggaagacatcgacatgaatcctgaggctctcaccgcgtggaaacgtgctaaagctgctgtgtaccgcaaggacaaggctcgcaagtctcgccgtatcttgcttgagttcatgcttgagcaagccaataagtttgctaaccataaggccatctggttcccttacaacatggactggcgcggtcgtgtttacgctgtgtcaatgttcaacccgcaaggtaacgatatgaccaaaggactgcttacgctggcgaaaggtaaaccaatcggtaaggaaggttactactggctgaaaatccacggtgcaaactgtgcgggtgtcgataaggttccgttccctgagcgcatcaagttcattgaggaaaaccacgagaacatcatggcttgcgctaagtctccactggagaacacttggtgggctgagcaagatagtccgttctgcttccttgcgttctgctttgagtacgctggggtacagcaccacggcctgagctataactgctcccttccgctggcgtttgacgggtcttgctctggcatccagcacttctccgcgatgctccgagatgaggtaggtggtcgcgcggttaacttgcttcctagtgaaaccgttcaggacatctacgggattgttgctaagaaagtcaacgagattctacaagcagacgcaatcaatgggaccgataacgaagtagttaccgtgaccgatgagaacgaaggtgaaatctctgagaaagtaaagctgggcactaaggcactggctggtcaatggctgaagtacggtgttactcgcagtgtgactaagcgttcagtcatgacgctggcttacgggtccaaagagttcggcttccgtcaacaagtgctgcgctggactattcagccagctattgattccggcaagggtctgatgttcactcagccgaatcaggctgctggatacatggctaagctgatttgggagtctgtgagcgtgacggtggtagctgcggttgaagcaatgaactggcttaagtctgctgctaagctgctggctgctgaggtcaaagataaagccactggagagattcttcgcaagcgttgcgctgtgcattgggtaactcctgatggtttccctgtgtggcaggaatacaagaagcctattcagacgcgcttgaacctgatgttcctcggtcagttccgcttacagcctaccattaacaccaacaaagatagcgagattgatgcacataaacaggtgtctggtatcgctcctaactttgtacacagccaagacggtagccaccttcgtaagactgtagtgtgggcacacgagaagtacggaatcgaatcttttgcactgattcacgactccttcggtaccattccggctgacgctgcgaacctgttcaaagcagtgcgcgaaactatggttgacacatatgagtcttgtgatgtactggctgatttctacgaccagttcgctgaccagttgcacgagtctcaattggacaaaatgccagcacttccggctaaaggtaacttgaacctccgtgacatcttagagtcggacttcgcgttcgcg

SEQ ID NO: 808 - protein, 890 aa, synthetic construct
  REGION 1..890: note = Variant of RNA polymerase
MHHHHHHMNTINIAKNDFSDIELAAIPFNTLVDHYGEGLAREQLALEHESYEMGEERFRKMFERQLKAGEVADNAAAKPLITTLLPKMIARINDWFEEVKAKRGKRPTAFQFLQEIKPEAVAYITIKTTLACLTSAGRTTVQNVASAIGYAIEDEARFGRIRDLEAKHFLKNVEEQLNKRVGHVYKKAFMQVVEADMLSKGLLGGEAWSSWHKEDSIHVGVRCIEMLIESTGMVSLHRQNAGVVGKDSETIELAPEYAEAIATRAGALAGISPMFQPCVVPPKPWTGITGGGYWANGRRPLALVRTHSKKGLMRYEDVYMPEVYKAINIAQNTAWSINKWVLAVANVITKWKHCPVEDIPAIEREELPMKPEDIDMNPEALTAWKRAKAAVYRKDKARKSRRILLEFMLEQANKFANHKAIWFPYNMDWRGRVYAVSMFNPQGNDMTKGLLTLAKGKPIGKEGYYWLKIHGANCAGVDKVPFPERIKFIEENHENIMACAKSPLENTWWAEQDSPFCFLAFCFEYAGVQHHGLSYNCSLPLAFDGSCSGIQHFSAMLRDEVGGRAVNLLPSETVQDIYGIVAKKVNEILQADAINGTDNEVVTVTDENEGEISEKVKLGTKALAGQWLKYGVTRSVTKRSVMTLAYGSKEFGFRQQVLRWTIQPAIDSGKGLMFTQPNQAAGYMAKLIWESVSVTVVAAVEAMNWLKSAAKLLAAEVKDKATGEILRKRCAVHWVTPDGFPVWQEYKKPIQTRLNLMFLGQFRLQPTINTNKDSEIDAHKQVSGIAPNFVHSQDGSHLRKTVVWAHEKYGIESFALIHDSFGTIPADAANLFKAVRETMVDTYESCDVLADFYDQFADQLHESQLDKMPALPAKGNLNLRDILESDFAFA

SEQ ID NO: 809 - DNA, 2670 bp, synthetic construct
  misc_feature 1..2670: note = Variant of RNA polymerase
  source 1..2670: mol_type = other DNA
atgcaccatcaccatcaccatatgaacacgattaacatcgctaagaacgacttctctgacatcgaactggctgctatcccgttcaacactctggtcgaccattacggtgagggtttagctcgcgaacagttggcccttgagcatgagtcttacgaaatgggtgaaactcgtttccgcaagatgtttgagcgtcaacttaaagctggtgaggttgcggataacgctgccgccaagcctctcatcactaccctactccctaagatgattgcacgcattaacgactggtttgaggaagtgaaagctaagcgcggcaagcgcccgacagccttccagttcctgcaagaaatcaagccggaagccgtagcgtacatcaccattaagaccactctggcttgcctaaccagtgcgggccgtacaaccgttcaggctgtagcaagcgcaatcggttatgccattgaggacgaggctcgcttcggtcgtatccgtgaccttgaagctaagcacttcctgaaaaacgttgaggaacaactcaacaaacgcgtagggcacgtctacaagaaagcatttatgcaagttgtcgaggctgacatgctctctaagggtctactcggtggcgaggcgtggtcttcgtggcataaggaagactctattcatgtaggagtacgctgcatcgagatgctcattgagtcaaccggaatggttagcttacaccgccaaaatgctggcgtagtaggtaaagactctgagactatcgaactcgcacctgaatacgctgaggctattgcaacccgtgcaggtgcgctggctggcatctctccgatgttccaaccttgcgtagttcctcctaagccgtggactggcattactggtggtggctattgggctaacggtcgtcgtcctctggcgctggtgcgtactcacagtaagaaaggtctgatgcgctacgaagacgtttacatgcctgaggtgtacaaagcgattaacattgcgcaaaacaccgcctggtcgatcaacaagtgggtcctggcggtcgccaacgtaatcaccaagtggaagcattgtccggtcgaggacatccctgcgattgagcgtgaagaactcccgatgaaaccggaagacatcgacatgaatcctgaggctctcaccgcgtggaaacgtgctaaagctgctgtggcgcgcaaggacaaggctcgcaagtctcgccgtatcttgcttgagttcatgcttgagcaagccaataagtttgctaaccataaggccatctggttcccttacaacatggactggcgcggtcgtgtttacgctgtgtcaatgttcaacccgcaaggtaacgatatgaccaaaggactgcttacgctggcgaaaggtaaaccaatcggtaaggaaggttactactggctgaaaatccacggtgcaaactgtgcgggtgtcgataaggttccgttccctgagcgcatcaagttcattgaggaaaaccacgagaacatcatggcttgcgctaagtctccactggagaacacttggtgggctgagcaagatagtccgttctgcttccttgcgttctgctttgagtacgctggggtacagcaccacggcctgagctataactgctcccttccgctggcgtttgacgggtcttgctctggcatccagcacttctccgcgatgctccgagatgaggtaggtggtcgcgcggttaacttgcttcctagtgaaaccgttcaggacatctacgggattgttgctaagaaagtcaacgagattctacaagcagacgcaatcaatgggaccgataacgaagtagttaccgtgaccgatgagaacgaaggtgaaatctctgagaaagtaaagctgggcactaaggcactggctggtcaatggctgaagtacggtgttactcgcagtgtgactaagcgttcagtcatgacgctggcttacgggtccaaagagttcggcttccgtcaacaagtgctgcgctggactattcagccagctattgattccggcaagggtctgatgttcactcagccgaatcaggctgctggatacatggctaagctgatttgggagtctgtgagcgtgacggtggtagctgcggttgaagcaatgaactggcttaagtctgctgctaagctgctggctgctgaggtcaaagataagaagactggagagattcttcgcaagcgttgcgctgtgcattgggtaactcctgatggtttccctgtgtggcaggaatacaagaagcctattcagacgcgcttgaacctgatgttcctcggtcagttccgcttacagcctaccattaacaccaacaaagatagcgagattgatgcacataaacaggtgtctggtatcgctcctaactttgtacacagccaagacggtagccaccttcgtaagactgtagtgtgggcacacgagaagtacggaatcgaatcttttgcactgattcacgactccttcggtaccattccggctgacgctgcgaacctgttcaaagcagtgcgcgaaactatggttgacacatatgagtcttgtgatgtactggctgatttctacgaccagttcgctgaccagttgcacgagtctcaattggacaaaatgccagcacttccggctaaaggtaacttgaacctccgtgacatcttagagtcggacttcgcgttcgcg

SEQ ID NO: 810 - protein, 890 aa, synthetic construct
  REGION 1..890: note = Variant of RNA polymerase
MHHHHHHMNTINIAKNDFSDIELAAIPFNTLVDHYGEGLAREQLALEHESYEMGETRFRKMFERQLKAGEVADNAAAKPLITTLLPKMIARINDWFEEVKAKRGKRPTAFQFLQEIKPEAVAYITIKTTLACLTSAGRTTVQAVASAIGYAIEDEARFGRIRDLEAKHFLKNVEEQLNKRVGHVYKKAFMQVVEADMLSKGLLGGEAWSSWHKEDSIHVGVRCIEMLIESTGMVSLHRQNAGVVGKDSETIELAPEYAEAIATRAGALAGISPMFQPCVVPPKPWTGITGGGYWANGRRPLALVRTHSKKGLMRYEDVYMPEVYKAINIAQNTAWSINKWVLAVANVITKWKHCPVEDIPAIEREELPMKPEDIDMNPEALTAWKRAKAAVARKDKARKSRRILLEFMLEQANKFANHKAIWFPYNMDWRGRVYAVSMFNPQGNDMTKGLLTLAKGKPIGKEGYYWLKIHGANCAGVDKVPFPERIKFIEENHENIMACAKSPLENTWWAEQDSPFCFLAFCFEYAGVQHHGLSYNCSLPLAFDGSCSGIQHFSAMLRDEVGGRAVNLLPSETVQDIYGIVAKKVNEILQADAINGTDNEVVTVTDENEGEISEKVKLGTKALAGQWLKYGVTRSVTKRSVMTLAYGSKEFGFRQQVLRWTIQPAIDSGKGLMFTQPNQAAGYMAKLIWESVSVTVVAAVEAMNWLKSAAKLLAAEVKDKKTGEILRKRCAVHWVTPDGFPVWQEYKKPIQTRLNLMFLGQFRLQPTINTNKDSEIDAHKQVSGIAPNFVHSQDGSHLRKTVVWAHEKYGIESFALIHDSFGTIPADAANLFKAVRETMVDTYESCDVLADFYDQFADQLHESQLDKMPALPAKGNLNLRDILESDFAFA

SEQ ID NO: 811 - DNA, 2670 bp, synthetic construct
  misc_feature 1..2670: note = Variant of RNA polymerase
  source 1..2670: mol_type = other DNA
atgcaccatcaccatcaccatatgaacacgattaacatcgctaagaacgacttctctgacatcgaactggctgctatcccgttcaacactctggtcgaccattacggtgagggtttagctcgcgaacagttggcccttgagcatgagtcttacgaaatgggtgaagaacgtttccgcaagatgtttgagcgtcaacttaaagctggtgaggttgcggataacgctgccgccaagcctctcatcactaccctactccctaagatgattgcacgcattaacgactggtttgaggaagtgaaagctaagcgcggcaagcgcccgacagccttccagttcctgcaagaaatcaagccggaagccgtagcgtacatcaccattaagaccactctggcttgcctaaccagtgcgggccgtacaaccgttcaggctgtagcaagcgcaatcggttatgccattgaggacgaggctcgcttcggtcgtatccgtgaccttgaagctaagcacttcctgaaaaacgttgaggaacaactcaacaaacgcgtagggcacgtctacaagaaagcatttatgcaagttgtcgaggctgacatgctctctaagggtctactcggtggcgaggcgtggtcttcgtggcataaggaagactctattcatgtaggagtacgctgcatcgagatgctcattgagtcaaccggaatggttagcttacaccgccaaaatgctggcgtagtaggtaaagactctgagactatcgaactcgcacctgaatacgctgaggctattgcaacccgtgcaggtgcgctggctggcatctctccgatgttccaaccttgcgtagttcctcctaagccgtggactggcattactggtggtggctattgggctaacggtcgtcgtcctctggcgctggtgcgtactcacagtaagaaaggtctgatgcgctacgaagacgtttacatgcctgaggtgtacaaagcgattaacattgcgcaaaacaccgcctggtcgatcaacaagtgggtcctggcggtcgccaacgtaatcaccaagtggaagcattgtccggtcgaggacatccctgcgattgagcgtgaagaactcccgatgaaaccggaagacatcgacatgaatcctgaggctctcaccgcgtggaaacgtgctaaagctgctgtggcgcgcaaggacaaggctcgcaagtctcgccgtatcttgcttgagttcatgcttgagcaagccaataagtttgctaaccataaggccatctggttcccttacaacatggactggcgcggtcgtgtttacgctgtgtcaatgttcaacccgcaaggtaacgatatgaccaaaggactgcttacgctggcgaaaggtaaaccaatcggtaaggaaggttactactggctgaaaatccacggtgcaaactgtgcgggtgtcgataaggttccgttccctgagcgcatcaagttcattgaggaaaaccacgagaacatcatggcttgcgctaagtctccactggagaacacttggtgggctgagcaagatagtccgttctgcttccttgcgttctgctttgagtacgctggggtacagcaccacggcctgagctataactgctcccttccgctggcgtttgacgggtcttgctctggcatccagcacttctccgcgatgctccgagatgaggtaggtggtcgcgcggttaacttgcttcctagtgaaaccgttcaggacatctacgggattgttgctaagaaagtcaacgagattctacaagcagacgcaatcaatgggaccgataacgaagtagttaccgtgaccgatgagaacgaaggtgaaatctctgagaaagtaaagctgggcactaaggcactggctggtcaatggctgaagtacggtgttactcgcagtgtgactaagcgttcagtcatgacgctggcttacgggtccaaagagttcggcttccgtcaacaagtgctgcgctggactattcagccagctattgattccggcaagggtctgatgttcactcagccgaatcaggctgctggatacatggctaagctgatttgggagtctgtgagcgtgacggtggtagctgcggttgaagcaatgaactggcttaagtctgctgctaagctgctggctgctgaggtcaaagataaaaaaactggagagattcttcgcaagcgttgcgctgtgcattgggtaactcctgatggtttccctgtgtggcaggaatacaagaagcctattcagacgcgcttgaacctgatgttcctcggtcagttccgcttacagcctaccattaacaccaacaaagatagcgagattgatgcacataaacaggtatctggtatcgctcctaactttgtacacagccaagacggtagccaccttcgtaagactgtagtgtgggcacacgagaagtacggaatcgaatcttttgcactgattcacgactccttcggtaccattccggctgacgctgcgaacctgttcaaagcagtgcgcgaaactatggttgacacatatgagtcttgtgatgtactggctgatttctacgaccagttcgctgaccagttgcacgagtctcaattggacaaaatgccagcacttccggctaaaggtaacttgaacctccgtgacatcttagagtcggacttcgcgttcgcg

SEQ ID NO: 812 - protein, 890 aa, synthetic construct
  REGION 1..890: note = Variant of RNA polymerase
MHHHHHHMNTINIAKNDFSDIELAAIPFNTLVDHYGEGLAREQLALEHESYEMGEERFRKMFERQLKAGEVADNAAAKPLITTLLPKMIARINDWFEEVKAKRGKRPTAFQFLQEIKPEAVAYITIKTTLACLTSAGRTTVQAVASAIGYAIEDEARFGRIRDLEAKHFLKNVEEQLNKRVGHVYKKAFMQVVEADMLSKGLLGGEAWSSWHKEDSIHVGVRCIEMLIESTGMVSLHRQNAGVVGKDSETIELAPEYAEAIATRAGALAGISPMFQPCVVPPKPWTGITGGGYWANGRRPLALVRTHSKKGLMRYEDVYMPEVYKAINIAQNTAWSINKWVLAVANVITKWKHCPVEDIPAIEREELPMKPEDIDMNPEALTAWKRAKAAVARKDKARKSRRILLEFMLEQANKFANHKAIWFPYNMDWRGRVYAVSMFNPQGNDMTKGLLTLAKGKPIGKEGYYWLKIHGANCAGVDKVPFPERIKFIEENHENIMACAKSPLENTWWAEQDSPFCFLAFCFEYAGVQHHGLSYNCSLPLAFDGSCSGIQHFSAMLRDEVGGRAVNLLPSETVQDIYGIVAKKVNEILQADAINGTDNEVVTVTDENEGEISEKVKLGTKALAGQWLKYGVTRSVTKRSVMTLAYGSKEFGFRQQVLRWTIQPAIDSGKGLMFTQPNQAAGYMAKLIWESVSVTVVAAVEAMNWLKSAAKLLAAEVKDKKTGEILRKRCAVHWVTPDGFPVWQEYKKPIQTRLNLMFLGQFRLQPTINTNKDSEIDAHKQVSGIAPNFVHSQDGSHLRKTVVWAHEKYGIESFALIHDSFGTIPADAANLFKAVRETMVDTYESCDVLADFYDQFADQLHESQLDKMPALPAKGNLNLRDILESDFAFA

SEQ ID NO: 813 - DNA, 2670 bp, synthetic construct
  misc_feature 1..2670: note = Variant of RNA polymerase
  source 1..2670: mol_type = other DNA
atgcaccatcaccatcaccatatgaacacgattaacatcgctaagaacgacttctctgacatcgaactggctgctatcccgttcaacactctggtcgaccattacggtgagggtttagctcgcgaacagttggcccttgagcatgagtcttacgaaatgggtgaagcacgtttccgcaagatgtttgagcgtcaacttaaagctggtgaggttgcggataacgctgccgccaagcctctcatcactaccctactccctaagatgattgcacgcattaacgactggtttgaggaagtgaaagctaagcgcggcaagcgcccgacagccttccagttcctgcaagaaatcaagccggaagccgtagcgtacatcaccattaagaccactctggcttgcctaaccagtgcgggccgtacaaccgttcagaacgtagcaagcgcaatcggttatgccattgaggacgaggctcgcttcggtcgtatccgtgaccttgaagctaagcacttcctgaaaaacgttgaggaacaactcaacaaacgcgtagggcacgtctacaagaaagcatttatgcaagttgtcgaggctgacatgctctctaagggtctactcggtggcgaggcgtggtcttcgtggcataaggaagactctattcatgtaggagtacgctgcatcgagatgctcattgagtcaaccggaatggttagcttacaccgccaaaatgctggcgtagtaggtaaggactctgagactatcgaactcgcacctgaatacgctgaggctattgcaacccgtgcaggtgcgctggctggcatctctccgatgttccaaccttgcgtagttcctcctaagccgtggactggcattactggtggtggctattgggctaacggtcgtcgtcctctggcgctggtgcgtactcacagtaagaaagggctgatgcgctacgaagacgtttacatgcctgaggtgtacaaagcgattaacattgcgcaaaacaccgcctggtcgatcaacaagtgggtcctggcggtcgccaacgtaatcaccaagtggaagcattgtccggtcgaggacatccctgcgattgagcgtgaagaactcccgatgaaaccggaagacatcgacatgaatcctgaggctctcaccgcgtggaaacgtgctaaagctgctgtgtaccgcaaggacaaggctcgcaagtctcgtcgtatctatcttgagttcatgcttgagcaagccaataagtttgctaaccataaggccatctggttcccttacaacatggactggcgcggtcgtgtttacgctgtgtcaatgttcaacccgcaaggtaacgatatgaccaaaggactgcttacgctggcgaaaggtaaaccaatcggtaaggaaggttactactggctgaaaatccacggtgcaaactgtgcgggtgtcgataaggttccgttccctgagcgcatcaagttcattgaggaaaaccacgagaacatcatggcttgcgctaagtctccactggagaacacttggtgggctgagcaagatagtccgttctgcttccttgcgttctgctttgagtacgctggggtacagcaccacggcctgagctataactgctcccttccgctggcgtttgacgggtcttgctctggcatccagcacttctccgcgatgctccgagatgaggtaggtggtcgcgcggttaacttgcttcctagtgaaaccgttcaggacatctacgggattgttgctaagaaagtcaacgagattctacaagcagacgcaatcaatgggaccgataacgaagtagttaccgtgaccgatgagaacgaaggtgaaatctctgagaaagtaaagctgggcactaaggcactggctggtcaatggctgaagtacggtgttactcgcagtgtgactaagcgttcagtcatgacgctggcttacgggtccaaagagttcggcttccgtcaacaagtgctgcgctggactattcagccagctattgattccggcaagggtctgatgttcactcagccgaatcaggctgctggatacatggctaagctgatttgggagtctgtgagcgtgacggtggtagctgcggttgaagcaatgaactggcttaagtctgctgctaagctgctggctgctgaggtcaaagattcgaaaactggagagattcttcgcaagcgttgcgctgtgcattgggtaactcctgatggtttccctgtgtggcaggaatacaagaagcctattcagacgcgcttgaacctgatgttcctcggtcagttccgcttacagcctaccattaacaccaacaaagatagcgagattgatgcacataaacaggtgtctggtatcgctcctaactttgtacacagccaagacggtagccaccttcgtaagactgtagtgtgggcacacgagaagtacggaatcgaatcttttgcactgattcacgactccttcggtaccattccggctgacgctgcgaacctgttcaaagcagtgcgcgaaactatggttgacacatatgagtcttgtgatgtactggctgatttctacgaccagttcgctgaccagttgcacgagtctcaattggacaaaatgccagcacttccggctaaaggtaacttgaacctccgtgacatcttagagtcggacttcgcgttcgcg

SEQ ID NO: 814 - protein, 890 aa, synthetic construct
  REGION 1..890: note = Variant of RNA polymerase
MHHHHHHMNTINIAKNDFSDIELAAIPFNTLVDHYGEGLAREQLALEHESYEMGEARFRKMFERQLKAGEVADNAAAKPLITTLLPKMIARINDWFEEVKAKRGKRPTAFQFLQEIKPEAVAYITIKTTLACLTSAGRTTVQNVASAIGYAIEDEARFGRIRDLEAKHFLKNVEEQLNKRVGHVYKKAFMQVVEADMLSKGLLGGEAWSSWHKEDSIHVGVRCIEMLIESTGMVSLHRQNAGVVGKDSETIELAPEYAEAIATRAGALAGISPMFQPCVVPPKPWTGITGGGYWANGRRPLALVRTHSKKGLMRYEDVYMPEVYKAINIAQNTAWSINKWVLAVANVITKWKHCPVEDIPAIEREELPMKPEDIDMNPEALTAWKRAKAAVYRKDKARKSRRIYLEFMLEQANKFANHKAIWFPYNMDWRGRVYAVSMFNPQGNDMTKGLLTLAKGKPIGKEGYYWLKIHGANCAGVDKVPFPERIKFIEENHENIMACAKSPLENTWWAEQDSPFCFLAFCFEYAGVQHHGLSYNCSLPLAFDGSCSGIQHFSAMLRDEVGGRAVNLLPSETVQDIYGIVAKKVNEILQADAINGTDNEVVTVTDENEGEISEKVKLGTKALAGQWLKYGVTRSVTKRSVMTLAYGSKEFGFRQQVLRWTIQPAIDSGKGLMFTQPNQAAGYMAKLIWESVSVTVVAAVEAMNWLKSAAKLLAAEVKDSKTGEILRKRCAVHWVTPDGFPVWQEYKKPIQTRLNLMFLGQFRLQPTINTNKDSEIDAHKQVSGIAPNFVHSQDGSHLRKTVVWAHEKYGIESFALIHDSFGTIPADAANLFKAVRETMVDTYESCDVLADFYDQFADQLHESQLDKMPALPAKGNLNLRDILESDFAFA

SEQ ID NO: 815 - DNA, 2670 bp, synthetic construct
  misc_feature 1..2670: note = Variant of RNA polymerase
  source 1..2670: mol_type = other DNA
atgcaccatcaccatcaccatatgaacacgattaacatcgctaagaacgacttctctgacatcgaactggctgctatcccgttcaacactctggtcgaccattacggtgagggtttagctcgcgaacagttggcccttgagcatgagtcttacgaaatgggtgaagaacgtttccgcaagatgtttgagcgtcaacttaaagctggtgaggttgcggataacgctgccgccaagcctctcatcactaccctactccctaagatgattgcacgcattaacgactggtttgaggaagtgaaagctaagcgcggcaagcgcccgacagccttccagttcctgcaagaaatcaagccggaagccgtagcgtacatcaccattaagaccactctggcttgcctaaccagtgcggaccgtacaaccgttcagaacgtagcaagcgcaatcggttatgccattgaggacgaggctcgcttcggtcgtatccgtgaccttgaagctaagcacttcctgaaaaacgttgaggaacaactcaacaaacgcgtagggcacgtctacaagaaagcatttatgcaagttgtcgaggctgacatgctctctaagggtctactcggtggcgaggcgtggtcttcgtggcataaggaagactctattcatgtaggagtacgctgcatcgagatgctcattgagtcaaccggaatggttagcttacaccgccaaaatgctggcgtagtaggtcgcgactctgagactatcgaactcgcacctgaatacgctgaggctattgcaacccgtgcaggtgcgctggctggcatctctccgatgttccaaccttgcgtagttcctcctaagccgtggactggcattactggtggtggctattgggctaacggtcgtcgtcctctggcgctggtgcgtactcacagtaagaaaggtctgatgcgctacgaagacgtttacatgcctgaggtgtacaaagcgattaacattgcgcaaaacaccgcctggtcgatcaacaagtgggtcctggcggtcgccaacgtaatcaccaagtggaagcattgtccggtcgaggacatccctgcgattgagcgtgaagaactcccgatgaaaccggaagacatcgacatgaatcctgaggctctcaccgcgtggaaacgtgctaaagctgctgtgtaccgcaaggacaaggctcgcaagtctcgtcgtatcctgcttgagttcatgcttgagcaagccaataagtttgctaaccataaggccatctggttcccttacaacatggactggcgcggtcgtgtttacgctgtgtcaatgttcaacccgcaaggtaacgatatgaccaaaggactgcttacgctggcgaaaggtaaaccaatcggtaaggaaggttactactggctgaaaatccacggtgcaaactgtgcgggtgtcgataaggttccgttccctgagcgcatcaagttcattgaggaaaaccacgagaacatcatggcttgcgctaagtctccactggagaacacttggtgggctgagcaagatagtccgttctgcttccttgcgttctgctttgagtacgctggggtacagcaccacggcctgagctataactgctcccttccgctggcgtttgacgggtcttgctctggcatccagcacttctccgcgatgctccgagatgaggtaggtggtcgcgcggttaacttgcttcctagtgaaaccgttcaggacatctacgggattgttgctaagaaagtcaacgagattctacaagcagacgcaatcaatgggaccgataacgaagtagttaccgtgaccgatgagaacgaaggtgaaatctctgagaaagtaaagctgggcactaaggcactggctggtcaatggctgaagtacggtgttactcgcagtgtgactaagcgttcagtcatgacgctggcttacgggtccaaagagttcggcttccgtcaacaagtgctgcgctggactattcagccagctattgattccggcaagggtctgatgttcactcagccgaatcaggctgctggatacatggctaagctgatttgggagtctgtgagcgtgacggtggtagctgcggttgaagcaatgaactggcttaagtctgctgctaagctgctggctgctgaggtcaaagataagaagactggagagattcttcgcaagcgttgcgctgtgcattgggtaactcctgatggtttccctgtgtggcaggaatacaagaagcctattcagacgcgcttgaacctgatgttcctcggtcagttccgcttacagcctaccattaacaccaacaaagatagcgagattgatgcacataaacaggtatctggtatcgctcctaactttgtacacagccaagacggtagccaccttcgtaagactgtagtgtgggcacacgagaagtacggaatcgaatcttttgcactgattcacgactccttcggtaccattccggctgacgctgcgaacctgttcaaagcagtgcgcgaaactatggttgacacatatgagtcttgtgatgtactggctgatttctacgaccagttcgctgaccagttgcacgagtctcaattggacaaaatgccagcacttccggctaaaggtaacttgaacctccgtgacatcttagagtcggacttcgcgttcgcg

SEQ ID NO: 816 - protein, 890 aa, synthetic construct
  REGION 1..890: note = Variant of RNA polymerase
MHHHHHHMNTINIAKNDFSDIELAAIPFNTLVDHYGEGLAREQLALEHESYEMGEERFRKMFERQLKAGEVADNAAAKPLITTLLPKMIARINDWFEEVKAKRGKRPTAFQFLQEIKPEAVAYITIKTTLACLTSADRTTVQNVASAIGYAIEDEARFGRIRDLEAKHFLKNVEEQLNKRVGHVYKKAFMQVVEADMLSKGLLGGEAWSSWHKEDSIHVGVRCIEMLIESTGMVSLHRQNAGVVGRDSETIELAPEYAEAIATRAGALAGISPMFQPCVVPPKPWTGITGGGYWANGRRPLALVRTHSKKGLMRYEDVYMPEVYKAINIAQNTAWSINKWVLAVANVITKWKHCPVEDIPAIEREELPMKPEDIDMNPEALTAWKRAKAAVYRKDKARKSRRILLEFMLEQANKFANHKAIWFPYNMDWRGRVYAVSMFNPQGNDMTKGLLTLAKGKPIGKEGYYWLKIHGANCAGVDKVPFPERIKFIEENHENIMACAKSPLENTWWAEQDSPFCFLAFCFEYAGVQHHGLSYNCSLPLAFDGSCSGIQHFSAMLRDEVGGRAVNLLPSETVQDIYGIVAKKVNEILQADAINGTDNEVVTVTDENEGEISEKVKLGTKALAGQWLKYGVTRSVTKRSVMTLAYGSKEFGFRQQVLRWTIQPAIDSGKGLMFTQPNQAAGYMAKLIWESVSVTVVAAVEAMNWLKSAAKLLAAEVKDKKTGEILRKRCAVHWVTPDGFPVWQEYKKPIQTRLNLMFLGQFRLQPTINTNKDSEIDAHKQVSGIAPNFVHSQDGSHLRKTVVWAHEKYGIESFALIHDSFGTIPADAANLFKAVRETMVDTYESCDVLADFYDQFADQLHESQLDKMPALPAKGNLNLRDILESDFAFA

SEQ ID NO: 817 - DNA, 2670 bp, synthetic construct
  misc_feature 1..2670: note = Variant of RNA polymerase
  source 1..2670: mol_type = other DNA
atgcaccatcaccatcaccatatgaacacgattaacatcgctaagaacgacttctctgacatcgaactggctgctatcccgttcaacactctggtcgaccattacggtgagggtttagctcgcgaacagttggcccttgagcatgagtcttacgaaatgggtgaagaacgtttccgcaagatgtttgagcgtcaacttaaagctggtgaggttgcggataacgctgccgccaagcctctcatcactaccctactccctaagatgattgcacgcattaacgactggtttgaggaagtgaaagctaagcgcggcaagcgcccgacagccttccagttcctgcaagaaatcaagccggaagccgtagcgtacatcaccattaagaccactctggcttgcctaaccagtgcggaccgtacaaccgttcaggctgtagcaagcgcaatcggttatgccattgaggacgaggctcgcttcggtcgtatccgtgaccttgaagctaagcacttcctgaaaaacgttgaggaacaactcaacaaacgcgtagggcacgtctacaagaaagcatttatgcaagttgtcgaggctgacatgctctctaagggtctactcggtggcgaggcgtggtcttcgtggcataaggaagactctattcatgtaggagtacgctgcatcgagatgctcattgagtcaaccggaatggttagcttacaccgccaaaatgctggcgtagtaggtaaagactctgagactatcgaactcgcacctgaatacgctgaggctattgcaacccgtgcaggtgcgctggctggcatctctccgatgttccaaccttgcgtagttcctcctaagccgtggactggcattactggtggtggctattgggctaacggtcgtcgtcctctggcgctggtgcgtactcacagtaagaaaggtctgatgcgctacgaagacgtttacatgcctgaggtgtacaaagcgattaacattgcgcaaaacaccgcctggtcgatcaacaagtgggtcctggcggtcgccaacgtaatcaccaagtggaagcattgtccggtcgaggacatccctgcgattgagcgtgaagaactcccgatgaaaccggaagacatcgacatgaatcctgaggctctcaccgcgtggaaacgtgctaaagctgctgtgcgccgcaaggacaaggctcgcaagtctcgtcgtatcctgcttgagttcatgcttgagcaagccaataagtttgctaaccataaggccatctggttcccttacaacatggactggcgcggtcgtgtttacgctgtgtcaatgttcaacccgcaaggtaacgatatgaccaaaggactgcttacgctggcgaaaggtaaaccaatcggtaaggaaggttactactggctgaaaatccacggtgcaaactgtgcgggtgtcgataaggttccgttccctgagcgcatcaagttcattgaggaaaaccacgagaacatcatggcttgcgctaagtctccactggagaacacttggtgggctgagcaagatagtccgttctgcttccttgcgttctgctttgagtacgctggggtacagcaccacggcctgagctataactgctcccttccgctggcgtttgacgggtcttgctctggcatccagcacttctccgcgatgctccgagatgaggtaggtggtcgcgcggttaacttgcttcctagtgaaaccgttcaggacatctacgggattgttgctaagaaagtcaacgagattctacaagcagacgcaatcaatgggaccgataacgaagtagttaccgtgaccgatgagaacgaaggtgaaatctctgagaaagtaaagctgggcactaaggcactggctggtcaatggctgaagtacggtgttactcgcagtgtgactaagcgttcagtcatgacgctggcttacgggtccaaagagttcggcttccgtcaacaagtgctgcgctggactattcagccagctattgattccggcaagggtctgatgttcactcagccgaatcaggctgctggatacatggctaagctgatttgggagtctgtgagcgtgacggtggtagctgcggttgaagcaatgaactggcttaagtctgctgctaagctgctggctgctgaggtcaaagataaaaaaactggagagattcttcgcaagcgttgcgctgtgcattgggtaactcctgatggtttccctgtgtggcaggaatacaagaagcctattcagacgcgcttgaacctgatgttcctcggtcagttccgcttacagcctaccattaacaccaacaaagatagcgagattgatgcacataaacaggtatctggtatcgctcctaactttgtacacagccaagacggtagccaccttcgtaagactgtagtgtgggcacacgagaagtacggaatcgaatcttttgcactgattcacgactccttcggtaccattccggctgacgctgcgaacctgttcaaagcagtgcgcgaaactatggttgacacatatgagtcttgtgatgtactggctgatttctacgaccagttcgctgaccagttgcacgagtctcaattggacaaaatgccagcacttccggctaaaggtaacttgaacctccgtgacatcttagagtcggacttcgcgttcgcg

SEQ ID NO: 818 - protein, 890 aa, synthetic construct
  REGION 1..890: note = Variant of RNA polymerase
MHHHHHHMNTINIAKNDFSDIELAAIPFNTLVDHYGEGLAREQLALEHESYEMGEERFRKMFERQLKAGEVADNAAAKPLITTLLPKMIARINDWFEEVKAKRGKRPTAFQFLQEIKPEAVAYITIKTTLACLTSADRTTVQAVASAIGYAIEDEARFGRIRDLEAKHFLKNVEEQLNKRVGHVYKKAFMQVVEADMLSKGLLGGEAWSSWHKEDSIHVGVRCIEMLIESTGMVSLHRQNAGVVGKDSETIELAPEYAEAIATRAGALAGISPMFQPCVVPPKPWTGITGGGYWANGRRPLALVRTHSKKGLMRYEDVYMPEVYKAINIAQNTAWSINKWVLAVANVITKWKHCPVEDIPAIEREELPMKPEDIDMNPEALTAWKRAKAAVRRKDKARKSRRILLEFMLEQANKFANHKAIWFPYNMDWRGRVYAVSMFNPQGNDMTKGLLTLAKGKPIGKEGYYWLKIHGANCAGVDKVPFPERIKFIEENHENIMACAKSPLENTWWAEQDSPFCFLAFCFEYAGVQHHGLSYNCSLPLAFDGSCSGIQHFSAMLRDEVGGRAVNLLPSETVQDIYGIVAKKVNEILQADAINGTDNEVVTVTDENEGEISEKVKLGTKALAGQWLKYGVTRSVTKRSVMTLAYGSKEFGFRQQVLRWTIQPAIDSGKGLMFTQPNQAAGYMAKLIWESVSVTVVAAVEAMNWLKSAAKLLAAEVKDKKTGEILRKRCAVHWVTPDGFPVWQEYKKPIQTRLNLMFLGQFRLQPTINTNKDSEIDAHKQVSGIAPNFVHSQDGSHLRKTVVWAHEKYGIESFALIHDSFGTIPADAANLFKAVRETMVDTYESCDVLADFYDQFADQLHESQLDKMPALPAKGNLNLRDILESDFAFA

SEQ ID NO: 819 - DNA, 2670 bp, synthetic construct
  misc_feature 1..2670: note = Variant of RNA polymerase
  source 1..2670: mol_type = other DNA
atgcaccatcaccatcaccatatgaacacgattaacatcgctaagaacgacttctctgacatcgaactggctgctatcccgttcaacactctggtcgaccattacggtgagggtttagctcgcgaacagttggcccttgagcatgagtcttacgaaatgggtgaaactcgtttccgcaagatgtttgagcgtcaacttaaagctggtgaggttgcggataacgctgccgccaagcctctcatcactaccctactccctaagatgattgcacgcattaacgactggtttgaggaagtgaaagctaagcgcggcaagcgcccgacagccttccagttcctgcaagaaatcaagccggaagccgtagcgtacatcaccattaagaccactctggcttgcctaaccagtgcggaccgtacaaccgttcaggctgtagcaagcgcaatcggttatgccattgaggacgaggctcgcttcggtcgtatccgtgaccttgaagctaagcacttcctgaaaaacgttgaggaacaactcaacaaacgcgtagggcacgtctacaagaaagcatttatgcaagttgtcgaggctgacatgctctctaagggtctactcggtggcgaggcgtggtcttcgtggcataaggaagactctattcatgtaggagtacgctgcatcgagatgctcattgagtcaaccggaatggttagcttacaccgccaaaatgctggcgtagtaggtaaagactctgagactatcgaactcgcacctgaatacgctgaggctattgcaacccgtgcaggtgcgctggctggcatctctccgatgttccaaccttgcgtagttcctcctaagccgtggactggcattactggtggtggctattgggctaacggtcgtcgtcctctggcgctggtgcgtactcacagtaagaaaggtctgatgcgctacgaagacgtttacatgcctgaggtgtacaaagcgattaacattgcgcaaaacaccgcctggtcgatcaacaagtgggtcctggcggtcgccaacgtaatcaccaagtggaagcattgtccggtcgaggacatccctgcgattgagcgtgaagaactcccgatgaaaccggaagacatcgacatgaatcctgaggctctcaccgcgtggaaacgtgctaaagctgctgtgcgccgcaaggacaaggctcgcaagtctcgtcgtatctatcttgagttcatgcttgagcaagccaataagtttgctaaccataaggccatctggttcccttacaacatggactggcgcggtcgtgtttacgctgtgtcaatgttcaacccgcaaggtaacgatatgaccaaaggactgcttacgctggcgaaaggtaaaccaatcggtaaggaaggttactactggctgaaaatccacggtgcaaactgtgcgggtgtcgataaggttccgttccctgagcgcatcaagttcattgaggaaaaccacgagaacatcatggcttgcgctaagtctccactggagaacacttggtgggctgagcaagatagtccgttctgcttccttgcgttctgctttgagtacgctggggtacagcaccacggcctgagctataactgctcccttccgctggcgtttgacgggtcttgctctggcatccagcacttctccgcgatgctccgagatgaggtaggtggtcgcgcggttaacttgcttcctagtgaaaccgttcaggacatctacgggattgttgctaagaaagtcaacgagattctacaagcagacgcaatcaatgggaccgataacgaagtagttaccgtgaccgatgagaacgaaggtgaaatctctgagaaagtaaagctgggcactaaggcactggctggtcaatggctgaagtacggtgttactcgcagtgtgactaagcgttcagtcatgacgctggcttacgggtccaaagagttcggcttccgtcaacaagtgctgcgctggactattcagccagctattgattccggcaagggtctgatgttcactcagccgaatcaggctgctggatacatggctaagctgatttgggagtctgtgagcgtgacggtggtagctgcggttgaagcaatgaactggcttaagtctgctgctaagctgctggctgctgaggtcaaagataagaagactggagagattcttcgcaagcgttgcgctgtgcattgggtaactcctgatggtttccctgtgtggcaggaatacaagaagcctattcagacgcgcttgaacctgatgttcctcggtcagttccgcttacagcctaccattaacaccaacaaagatagcgagattgatgcacataaacaggtgtctggtatcgctcctaactttgtacacagccaagacggtagccaccttcgtaagactgtagtgtgggcacacgagaagtacggaatcgaatcttttgcactgattcacgactccttcggtaccattccggctgacgctgcgaacctgttcaaagcagtgcgcgaaactatggttgacacatatgagtcttgtgatgtactggctgatttctacgaccagttcgctgaccagttgcacgagtctcaattggacaaaatgccagcacttccggctaaaggtaacttgaacctccgtgacatcttagagtcggacttcgcgttcgcg

SEQ ID NO: 820 - protein, 890 aa, synthetic construct
  REGION 1..890: note = Variant of RNA polymerase
MHHHHHHMNTINIAKNDFSDIELAAIPFNTLVDHYGEGLAREQLALEHESYEMGETRFRKMFERQLKAGEVADNAAAKPLITTLLPKMIARINDWFEEVKAKRGKRPTAFQFLQEIKPEAVAYITIKTTLACLTSADRTTVQAVASAIGYAIEDEARFGRIRDLEAKHFLKNVEEQLNKRVGHVYKKAFMQVVEADMLSKGLLGGEAWSSWHKEDSIHVGVRCIEMLIESTGMVSLHRQNAGVVGKDSETIELAPEYAEAIATRAGALAGISPMFQPCVVPPKPWTGITGGGYWANGRRPLALVRTHSKKGLMRYEDVYMPEVYKAINIAQNTAWSINKWVLAVANVITKWKHCPVEDIPAIEREELPMKPEDIDMNPEALTAWKRAKAAVRRKDKARKSRRIYLEFMLEQANKFANHKAIWFPYNMDWRGRVYAVSMFNPQGNDMTKGLLTLAKGKPIGKEGYYWLKIHGANCAGVDKVPFPERIKFIEENHENIMACAKSPLENTWWAEQDSPFCFLAFCFEYAGVQHHGLSYNCSLPLAFDGSCSGIQHFSAMLRDEVGGRAVNLLPSETVQDIYGIVAKKVNEILQADAINGTDNEVVTVTDENEGEISEKVKLGTKALAGQWLKYGVTRSVTKRSVMTLAYGSKEFGFRQQVLRWTIQPAIDSGKGLMFTQPNQAAGYMAKLIWESVSVTVVAAVEAMNWLKSAAKLLAAEVKDKKTGEILRKRCAVHWVTPDGFPVWQEYKKPIQTRLNLMFLGQFRLQPTINTNKDSEIDAHKQVSGIAPNFVHSQDGSHLRKTVVWAHEKYGIESFALIHDSFGTIPADAANLFKAVRETMVDTYESCDVLADFYDQFADQLHESQLDKMPALPAKGNLNLRDILESDFAFA

SEQ ID NO: 821 - DNA, 2670 bp, synthetic construct
  misc_feature 1..2670: note = Variant of RNA polymerase
  source 1..2670: mol_type = other DNA
atgcaccatcaccatcaccatatgaacacgattaacatcgctaagaacgacttctctgacatcgaactggctgctatcccgttcaacactctggtcgaccattacggtgagggtttagctcgcgaacagttggcccttgagcatgagtcttacgaaatgggtgaaactcgtttccgcaagatgtttgagcgtcaacttaaagctggtgaggttgcggataacgctgccgccaagcctctcatcactaccctactccctaagatgattgcacgcattaacgactggtttgaggaagtgaaagctaagcgcggcaagcgcccgacagccttccagttcctgcaagaaatcaagccggaagccgtagcgtacatcaccattaagaccactctggcttgcctaaccagtgcggaccgtacaaccgttcaggctgtagcaagcgcaatcggttatgccattgaggacgaggctcgcttcggtcgtatccgtgaccttgaagctaagcacttcctgaaaaacgttgaggaacaactcaacaaacgcgtagggcacgtctacaagaaagcatttatgcaagttgtcgaggctgacatgctctctaagggtctactcggtggcgaggcgtggtcttcgtggcataaggaagactctattcatgtaggagtacgctgcatcgagatgctcattgagtcaaccggaatggttagcttacaccgccaaaatgctggcgtagtaggtaaagactctgagactatcgaactcgcacctgaatacgctgaggctattgcaacccgtgcaggtgcgctggctggcatctctccgatgttccaaccttgcgtagttcctcctaagccgtggactggcattactggtggtggctattgggctaacggtcgtcgtcctctggcgctggtgcgtactcacagtaagaaaggtctgatgcgctacgaagacgtttacatgcctgaggtgtacaaagcgattaacattgcgcaaaacaccgcctggtcgatcaacaagtgggtcctggcggtcgccaacgtaatcaccaagtggaagcattgtccggtcgaggacatccctgcgattgagcgtgaagaactcccgatgaaaccggaagacatcgacatgaatcctgaggctctcaccgcgtggaaacgtgctaaagctgctgtgcgccgcaaggacaaggctcgcaagtctcgccgtatcttgcttgagttcatgcttgagcaagccaataagtttgctaaccataaggccatctggttcccttacaacatggactggcgcggtcgtgtttacgctgtgtcaatgttcaacccgcaaggtaacgatatgaccaaaggactgcttacgctggcgaaaggtaaaccaatcggtaaggaaggttactactggctgaaaatccacggtgcaaactgtgcgggtgtcgataaggttccgttccctgagcgcatcaagttcattgaggaaaaccacgagaacatcatggcttgcgctaagtctccactggagaacacttggtgggctgagcaagatagtccgttctgcttccttgcgttctgctttgagtacgctggggtacagcaccacggcctgagctataactgctcccttccgctggcgtttgacgggtcttgctctggcatccagcacttctccgcgatgctccgagatgaggtaggtggtcgcgcggttaacttgcttcctagtgaaaccgttcaggacatctacgggattgttgctaagaaagtcaacgagattctacaagcagacgcaatcaatgggaccgataacgaagtagttaccgtgaccgatgagaacgaaggtgaaatctctgagaaagtaaagctgggcactaaggcactggctggtcaatggctgaagtacggtgttactcgcagtgtgactaagcgttcagtcatgacgctggcttacgggtccaaagagttcggcttccgtcaacaagtgctgcgctggactattcagccagctattgattccggcaagggtctgatgttcactcagccgaatcaggctgctggatacatggctaagctgatttgggagtctgtgagcgtgacggtggtagctgcggttgaagcaatgaactggcttaagtctgctgctaagctgctggctgctgaggtcaaagataagaagactggagagattcttcgcaagcgttgcgctgtgcattgggtaactcctgatggtttccctgtgtggcaggaatacaagaagcctattcagacgcgcttgaacctgatgttcctcggtcagttccgcttacagcctaccattaacaccaacaaagatagcgagattgatgcacataaacaggtgtctggtatcgctcctaactttgtacacagccaagacggtagccaccttcgtaagactgtagtgtgggcacacgagaagtacggaatcgaatcttttgcactgattcacgactccttcggtaccattccggctgacgctgcgaacctgttcaaagcagtgcgcgaaactatggttgacacatatgagtcttgtgatgtactggctgatttctacgaccagttcgctgaccagttgcacgagtctcaattggacaaaatgccagcacttccggctaaaggtaacttgaacctccgtgacatcttagagtcggacttcgcgttcgcg

SEQ ID NO: 822 - protein, 890 aa, synthetic construct
  REGION 1..890: note = Variant of RNA polymerase
MHHHHHHMNTINIAKNDFSDIELAAIPFNTLVDHYGEGLAREQLALEHESYEMGETRFRKMFERQLKAGEVADNAAAKPLITTLLPKMIARINDWFEEVKAKRGKRPTAFQFLQEIKPEAVAYITIKTTLACLTSADRTTVQAVASAIGYAIEDEARFGRIRDLEAKHFLKNVEEQLNKRVGHVYKKAFMQVVEADMLSKGLLGGEAWSSWHKEDSIHVGVRCIEMLIESTGMVSLHRQNAGVVGKDSETIELAPEYAEAIATRAGALAGISPMFQPCVVPPKPWTGITGGGYWANGRRPLALVRTHSKKGLMRYEDVYMPEVYKAINIAQNTAWSINKWVLAVANVITKWKHCPVEDIPAIEREELPMKPEDIDMNPEALTAWKRAKAAVRRKDKARKSRRILLEFMLEQANKFANHKAIWFPYNMDWRGRVYAVSMFNPQGNDMTKGLLTLAKGKPIGKEGYYWLKIHGANCAGVDKVPFPERIKFIEENHENIMACAKSPLENTWWAEQDSPFCFLAFCFEYAGVQHHGLSYNCSLPLAFDGSCSGIQHFSAMLRDEVGGRAVNLLPSETVQDIYGIVAKKVNEILQADAINGTDNEVVTVTDENEGEISEKVKLGTKALAGQWLKYGVTRSVTKRSVMTLAYGSKEFGFRQQVLRWTIQPAIDSGKGLMFTQPNQAAGYMAKLIWESVSVTVVAAVEAMNWLKSAAKLLAAEVKDKKTGEILRKRCAVHWVTPDGFPVWQEYKKPIQTRLNLMFLGQFRLQPTINTNKDSEIDAHKQVSGIAPNFVHSQDGSHLRKTVVWAHEKYGIESFALIHDSFGTIPADAANLFKAVRETMVDTYESCDVLADFYDQFADQLHESQLDKMPALPAKGNLNLRDILESDFAFA

SEQ ID NO: 823 - DNA, 2670 bp, synthetic construct
  misc_feature 1..2670: note = Variant of RNA polymerase
  source 1..2670: mol_type = other DNA
atgcaccatcaccatcaccatatgaacacgattaacatcgctaagaacgacttctctgacatcgaactggctgctatcccgttcaacactctggtcgaccattacggtgagggtttagctcgcgaacagttggcccttgagcatgagtcttacgaaatgggtgaaactcgtttccgcaagatgtttgagcgtcaacttaaagctggtgaggttgcggataacgctgccgccaagcctctcatcactaccctactccctaagatgattgcacgcattaacgactggtttgaggaagtgaaagctaagcgcggcaagcgcccgacagccttccagttcctgcaagaaatcaagccggaagccgtagcgtacatcaccattaagaccactctggcttgcctaaccagtgcgggccgtacaaccgttcaggctgtagcaagcgcaatcggttatgccattgaggacgaggctcgcttcggtcgtatccgtgaccttgaagctaagcacttcctgaaaaacgttgaggaacaactcaacaaacgcgtagggcacgtctacaagaaagcatttatgcaagttgtcgaggctgacatgctctctaagggtctactcggtggcgaggcgtggtcttcgtggcataaggaagactctattcatgtaggagtacgctgcatcgagatgctcattgagtcaaccggaatggttagcttacaccgccaaaatgctggcgtagtaggtaaagactctgagactatcgaactcgcacctgaatacgctgaggctattgcaacccgtgcaggtgcgctggctggcatctctccgatgttccaaccttgcgtagttcctcctaagccgtggactggcattactggtggtggctattgggctaacggtcgtcgtcctctggcgctggtgcgtactcacagtaagaaaggtctgatgcgctacgaagacgtttacatgcctgaggtgtacaaagcgattaacattgcgcaaaacaccgcctggtcgatcaacaagtgggtcctggcggtcgccaacgtaatcaccaagtggaagcattgtccggtcgaggacatccctgcgattgagcgtgaagaactcccgatgaaaccggaagacatcgacatgaatcctgaggctctcaccgcgtggaaacgtgctaaagctgctgtgcgccgcaaggacaaggctcgcaagtctcgccgtatcttgcttgagttcatgcttgagcaagccaataagtttgctaaccataaggccatctggttcccttacaacatggactggcgcggtcgtgtttacgctgtgtcaatgttcaacccgcaaggtaacgatatgaccaaaggactgcttacgctggcgaaaggtaaaccaatcggtaaggaaggttactactggctgaaaatccacggtgcaaactgtgcgggtgtcgataaggttccgttccctgagcgcatcaagttcattgaggaaaaccacgagaacatcatggcttgcgctaagtctccactggagaacacttggtgggctgagcaagatagtccgttctgcttccttgcgttctgctttgagtacgctggggtacagcaccacggcctgagctataactgctcccttccgctggcgtttgacgggtcttgctctggcatccagcacttctccgcgatgctccgagatgaggtaggtggtcgcgcggttaacttgcttcctagtgaaaccgttcaggacatctacgggattgttgctaagaaagtcaacgagattctacaagcagacgcaatcaatgggaccgataacgaagtagttaccgtgaccgatgagaacgaaggtgaaatctctgagaaagtaaagctgggcactaaggcactggctggtcaatggctgaagtacggtgttactcgcagtgtgactaagcgttcagtcatgacgctggcttacgggtccaaagagttcggcttccgtcaacaagtgctgcgctggactattcagccagctattgattccggcaagggtctgatgttcactcagccgaatcaggctgctggatacatggctaagctgatttgggagtctgtgagcgtgacggtggtagctgcggttgaagcaatgaactggcttaagtctgctgctaagctgctggctgctgaggtcaaagataaaaaaactggagagattcttcgcaagcgttgcgctgtgcattgggtaactcctgatggtttccctgtgtggcaggaatacaagaagcctattcagacgcgcttgaacctgatgttcctcggtcagttccgcttacagcctaccattaacaccaacaaagatagcgagattgatgcacataaacaggtatctggtatcgctcctaactttgtacacagccaagacggtagccaccttcgtaagactgtagtgtgggcacacgagaagtacggaatcgaatcttttgcactgattcacgactccttcggtaccattccggctgacgctgcgaacctgttcaaagcagtgcgcgaaactatggttgacacatatgagtcttgtgatgtactggctgatttctacgaccagttcgctgaccagttgcacgagtctcaattggacaaaatgccagcacttccggctaaaggtaacttgaacctccgtgacatcttagagtcggacttcgcgttcgcg

SEQ ID NO: 824 - protein, 890 aa, synthetic construct
  REGION 1..890: note = Variant of RNA polymerase
MHHHHHHMNTINIAKNDFSDIELAAIPFNTLVDHYGEGLAREQLALEHESYEMGETRFRKMFERQLKAGEVADNAAAKPLITTLLPKMIARINDWFEEVKAKRGKRPTAFQFLQEIKPEAVAYITIKTTLACLTSAGRTTVQAVASAIGYAIEDEARFGRIRDLEAKHFLKNVEEQLNKRVGHVYKKAFMQVVEADMLSKGLLGGEAWSSWHKEDSIHVGVRCIEMLIESTGMVSLHRQNAGVVGKDSETIELAPEYAEAIATRAGALAGISPMFQPCVVPPKPWTGITGGGYWANGRRPLALVRTHSKKGLMRYEDVYMPEVYKAINIAQNTAWSINKWVLAVANVITKWKHCPVEDIPAIEREELPMKPEDIDMNPEALTAWKRAKAAVRRKDKARKSRRILLEFMLEQANKFANHKAIWFPYNMDWRGRVYAVSMFNPQGNDMTKGLLTLAKGKPIGKEGYYWLKIHGANCAGVDKVPFPERIKFIEENHENIMACAKSPLENTWWAEQDSPFCFLAFCFEYAGVQHHGLSYNCSLPLAFDGSCSGIQHFSAMLRDEVGGRAVNLLPSETVQDIYGIVAKKVNEILQADAINGTDNEVVTVTDENEGEISEKVKLGTKALAGQWLKYGVTRSVTKRSVMTLAYGSKEFGFRQQVLRWTIQPAIDSGKGLMFTQPNQAAGYMAKLIWESVSVTVVAAVEAMNWLKSAAKLLAAEVKDKKTGEILRKRCAVHWVTPDGFPVWQEYKKPIQTRLNLMFLGQFRLQPTINTNKDSEIDAHKQVSGIAPNFVHSQDGSHLRKTVVWAHEKYGIESFALIHDSFGTIPADAANLFKAVRETMVDTYESCDVLADFYDQFADQLHESQLDKMPALPAKGNLNLRDILESDFAFA

SEQ ID NO: 825 - DNA, 2670 bp, synthetic construct
  misc_feature 1..2670: note = Variant of RNA polymerase
  source 1..2670: mol_type = other DNA
atgcaccatcaccatcaccatatgaacacgattaacatcgctaagaacgacttctctgacatcgaactggctgctatcccgttcaacactctggtcgaccattacggtgagggtttagctcgcgaacagttggcccttgagcatgagtcttacgaaatgggtgaagaacgtttccgcaagatgtttgagcgtcaacttaaagctggtgaggttgcggataacgctgccgccaagcctctcatcactaccctactccctaagatgattgcacgcattaacgactggtttgaggaagtgaaagctaagcgcggcaagcgcccgacagccttccagttcctgcaagaaatcaagccggaagccgtagcgtacatcaccattaagaccactctggcttgcctaaccagtgcgggccgtacaaccgttcaggctgtagcaagcgcaatcggttatgccattgaggacgaggctcgcttcggtcgtatccgtgaccttgaagctaagcacttcctgaaaaacgttgaggaacaactcaacaaacgcgtagggcacgtctacaagaaagcatttatgcaagttgtcgaggctgacatgctctctaagggtctactcggtggcgaggcgtggtcttcgtggcataaggaagactctattcatgtaggagtacgctgcatcgagatgctcattgagtcaaccggaatggttagcttacaccgccaaaatgctggcgtagtaggtaaagactctgagactatcgaactcgcacctgaatacgctgaggctattgcaacccgtgcaggtgcgctggctggcatctctccgatgttccaaccttgcgtagttcctcctaagccgtggactggcattactggtggtggctattgggctaacggtcgtcgtcctctggcgctggtgcgtactcacagtaagaaaggtctgatgcgctacgaagacgtttacatgcctgaggtgtacaaagcgattaacattgcgcaaaacaccgcctggtcgatcaacaagtgggtcctggcggtcgccaacgtaatcaccaagtggaagcattgtccggtcgaggacatccctgcgattgagcgtgaagaactcccgatgaaaccggaagacatcgacatgaatcctgaggctctcaccgcgtggaaacgtgctaaagctgctgtgtaccgcaaggacaaggctcgcaagtctcgccgtatcttgcttgagttcatgcttgagcaagccaataagtttgctaaccataaggccatctggttcccttacaacatggactggcgcggtcgtgtttacgctgtgtcaatgttcaacccgcaaggtaacgatatgaccaaaggactgcttacgctggcgaaaggtaaaccaatcggtaaggaaggttactactggctgaaaatccacggtgcaaactgtgcgggtgtcgataaggttccgttccctgagcgcatcaagttcattgaggaaaaccacgagaacatcatggcttgcgctaagtctccactggagaacacttggtgggctgagcaagatagtccgttctgcttccttgcgttctgctttgagtacgctggggtacagcaccacggcctgagctataactgctcccttccgctggcgtttgacgggtcttgctctggcatccagcacttctccgcgatgctccgagatgaggtaggtggtcgcgcggttaacttgcttcctagtgaaaccgttcaggacatctacgggattgttgctaagaaagtcaacgagattctacaagcagacgcaatcaatgggaccgataacgaagtagttaccgtgaccgatgagaacgaaggtgaaatctctgagaaagtaaagctgggcactaaggcactggctggtcaatggctgaagtacggtgttactcgcagtgtgactaagcgttcagtcatgacgctggcttacgggtccaaagagttcggcttccgtcaacaagtgctgcgctggactattcagccagctattgattccggcaagggtctgatgttcactcagccgaatcaggctgctggatacatggctaagctgatttgggagtctgtgagcgtgacggtggtagctgcggttgaagcaatgaactggcttaagtctgctgctaagctgctggctgctgaggtcaaagataagaagactggagagattcttcgcaagcgttgcgctgtgcattgggtaactcctgatggtttccctgtgtggcaggaatacaagaagcctattcagacgcgcttgaacctgatgttcctcggtcagttccgcttacagcctaccattaacaccaacaaagatagcgagattgatgcacataaacaggtgtctggtatcgctcctaactttgtacacagccaagacggtagccaccttcgtaagactgtagtgtgggcacacgagaagtacggaatcgaatcttttgcactgattcacgactccttcggtaccattccggctgacgctgcgaacctgttcaaagcagtgcgcgaaactatggttgacacatatgagtcttgtgatgtactggctgatttctacgaccagttcgctgaccagttgcacgagtctcaattggacaaaatgccagcacttccggctaaaggtaacttgaacctccgtgacatcttagagtcggacttcgcgttcgcg

SEQ ID NO: 826 - protein, 890 aa, synthetic construct
  REGION 1..890: note = Variant of RNA polymerase
MHHHHHHMNTINIAKNDFSDIELAAIPFNTLVDHYGEGLAREQLALEHESYEMGEERFRKMFERQLKAGEVADNAAAKPLITTLLPKMIARINDWFEEVKAKRGKRPTAFQFLQEIKPEAVAYITIKTTLACLTSAGRTTVQAVASAIGYAIEDEARFGRIRDLEAKHFLKNVEEQLNKRVGHVYKKAFMQVVEADMLSKGLLGGEAWSSWHKEDSIHVGVRCIEMLIESTGMVSLHRQNAGVVGKDSETIELAPEYAEAIATRAGALAGISPMFQPCVVPPKPWTGITGGGYWANGRRPLALVRTHSKKGLMRYEDVYMPEVYKAINIAQNTAWSINKWVLAVANVITKWKHCPVEDIPAIEREELPMKPEDIDMNPEALTAWKRAKAAVYRKDKARKSRRILLEFMLEQANKFANHKAIWFPYNMDWRGRVYAVSMFNPQGNDMTKGLLTLAKGKPIGKEGYYWLKIHGANCAGVDKVPFPERIKFIEENHENIMACAKSPLENTWWAEQDSPFCFLAFCFEYAGVQHHGLSYNCSLPLAFDGSCSGIQHFSAMLRDEVGGRAVNLLPSETVQDIYGIVAKKVNEILQADAINGTDNEVVTVTDENEGEISEKVKLGTKALAGQWLKYGVTRSVTKRSVMTLAYGSKEFGFRQQVLRWTIQPAIDSGKGLMFTQPNQAAGYMAKLIWESVSVTVVAAVEAMNWLKSAAKLLAAEVKDKKTGEILRKRCAVHWVTPDGFPVWQEYKKPIQTRLNLMFLGQFRLQPTINTNKDSEIDAHKQVSGIAPNFVHSQDGSHLRKTVVWAHEKYGIESFALIHDSFGTIPADAANLFKAVRETMVDTYESCDVLADFYDQFADQLHESQLDKMPALPAKGNLNLRDILESDFAFA

SEQ ID NO: 827 - DNA, 2670 bp, synthetic construct
  misc_feature 1..2670: note = Variant of RNA polymerase
  source 1..2670: mol_type = other DNA
atgcaccatcaccatcaccatatgaacacgattaacatcgctaagaacgacttctctgacatcgaactggctgctatcccgttcaacactctggtcgaccattacggtgagggtttagctcgcgaacagttggcccttgagcatgagtcttacgaaatgggtgaagaacgtttccgcaagatgtttgagcgtcaacttaaagctggtgaggttgcggataacgctgccgccaagcctctcatcactaccctactccctaagatgattgcacgcattaacgactggtttgaggaagtgaaagctaagcgcggcaagcgcccgacagccttccagttcctgcaagaaatcaagccggaagccgtagcgtacatcaccattaagaccactctggcttgcctaaccagtgcggaccgtacaaccgttcaggctgtagcaagcgcaatcggttatgccattgaggacgaggctcgcttcggtcgtatccgtgaccttgaagctaagcacttcctgaaaaacgttgaggaacaactcaacaaacgcgtagggcacgtctacaagaaagcatttatgcaagttgtcgaggctagcatgctctctaagggtctactcggtggcgaggcgtggtcttcgtggcataaggaagactctattcatgtaggagtacgctgcatcgagatgctcattgagtcaaccggaatggttagcttacaccgccaaaatgctggcgtagtaggtaaagactctgagactatcgaactcgcacctgaatacgctgaggctattgcaacccgtgcaggtgcgctggctggcatctctccgatgttccaaccttgcgtagttcctcctaagccgtggactggcattactggtggtggctattgggctaacggtcgtcgtcctctggcgctggtgcgtactcacagtaagaaaggtctgatgcgctacgaagacgtttacatgcctgaggtgtacaaagcgattaacattgcgcaaaacaccgcctggtcgatcaacaagtgggtcctggcggtcgccaacgtaatcaccaagtggaagcattgtccggtcgaggacatccctgcgattgagcgtgaagaactcccgatgaaaccggaagacatcgacatgaatcctgaggctctcaccgcgtggaaacgtgctaaagctgctgtggcgcgcaaggacaaggctcgcaagtctcgtcgtatcctgcttgagttcatgcttgagcaagccaataagtttgctaaccataaggccatctggttcccttacaacatggactggcgcggtcgtgtttacgctgtgtcaatgttcaacccgcaaggtaacgatatgaccaaaggactgcttacgctggcgaaaggtaaaccaatcggtaaggaaggttactactggctgaaaatccacggtgcaaactgtgcgggtgtcgataaggttccgttccctgagcgcatcaagttcattgaggaaaaccacgagaacatcatggcttgcgctaagtctccactggagaacacttggtgggctgagcaagatagtccgttctgcttccttgcgttctgctttgagtacgctggggtacagcaccacggcctgagctataactgctcccttccgctggcgtttgacgggtcttgctctggcatccagcacttctccgcgatgctccgagatgaggtaggtggtcgcgcggttaacttgcttcctagtgaaaccgttcaggacatctacgggattgttgctaagaaagtcaacgagattctacaagcagacgcaatcaatgggaccgataacgaagtagttaccgtgaccgatgagaacgaaggtgaaatctctgagaaagtaaagctgggcactaaggcactggctggtcaatggctgaagtacggtgttactcgcagtgtgactaagcgttcagtcatgacgctggcttacgggtccaaagagttcggcttccgtcaacaagtgctgcgctggactattcagccagctattgattccggcaagggtctgatgttcactcagccgaatcaggctgctggatacatggctaagctgatttgggagtctgtgagcgtgacggtggtagctgcggttgaagcaatgaactggcttaagtctgctgctaagctgctggctgctgaggtcaaagataagaagactggagagattcttcgcaagcgttgcgctgtgcattgggtaactcctgatggtttccctgtgtggcaggaatacaagaagcctattcagacgcgcttgaacctgatgttcctcggtcagttccgcttacagcctaccattaacaccaacaaagatagcgagattgatgcacataaacaggtatctggtatcgctcctaactttgtacacagccaagacggtagccaccttcgtaagactgtagtgtgggcacacgagaagtacggaatcgaatcttttgcactgattcacgactccttcggtaccattccggctgacgctgcgaacctgttcaaagcagtgcgcgaaactatggttgacacatatgagtcttgtgatgtactggctgatttctacgaccagttcgctgaccagttgcacgagtctcaattggacaaaatgccagcacttccggctaaaggtaacttgaacctccgtgacatcttagagtcggacttcgcgttcgcg

SEQ ID NO: 828 - protein, 890 aa, synthetic construct
  REGION 1..890: note = Variant of RNA polymerase
MHHHHHHMNTINIAKNDFSDIELAAIPFNTLVDHYGEGLAREQLALEHESYEMGEERFRKMFERQLKAGEVADNAAAKPLITTLLPKMIARINDWFEEVKAKRGKRPTAFQFLQEIKPEAVAYITIKTTLACLTSADRTTVQAVASAIGYAIEDEARFGRIRDLEAKHFLKNVEEQLNKRVGHVYKKAFMQVVEASMLSKGLLGGEAWSSWHKEDSIHVGVRCIEMLIESTGMVSLHRQNAGVVGKDSETIELAPEYAEAIATRAGALAGISPMFQPCVVPPKPWTGITGGGYWANGRRPLALVRTHSKKGLMRYEDVYMPEVYKAINIAQNTAWSINKWVLAVANVITKWKHCPVEDIPAIEREELPMKPEDIDMNPEALTAWKRAKAAVARKDKARKSRRILLEFMLEQANKFANHKAIWFPYNMDWRGRVYAVSMFNPQGNDMTKGLLTLAKGKPIGKEGYYWLKIHGANCAGVDKVPFPERIKFIEENHENIMACAKSPLENTWWAEQDSPFCFLAFCFEYAGVQHHGLSYNCSLPLAFDGSCSGIQHFSAMLRDEVGGRAVNLLPSETVQDIYGIVAKKVNEILQADAINGTDNEVVTVTDENEGEISEKVKLGTKALAGQWLKYGVTRSVTKRSVMTLAYGSKEFGFRQQVLRWTIQPAIDSGKGLMFTQPNQAAGYMAKLIWESVSVTVVAAVEAMNWLKSAAKLLAAEVKDKKTGEILRKRCAVHWVTPDGFPVWQEYKKPIQTRLNLMFLGQFRLQPTINTNKDSEIDAHKQVSGIAPNFVHSQDGSHLRKTVVWAHEKYGIESFALIHDSFGTIPADAANLFKAVRETMVDTYESCDVLADFYDQFADQLHESQLDKMPALPAKGNLNLRDILESDFAFA

1. An engineered RNA polymerase, or a functional fragment thereof, comprising an amino acid sequence having at least 70%, 75%, 80%, 81%, 82%, 83%, 84%, 85%, 86%, 87%, 88%, 89%, 90%, 91%, 92%, 93%, 94%, 95%, 96%, 97%, 98%, 99%, or more sequence identity to a reference sequence corresponding to residues 8 to 890 of SEQ ID NO: 2, 4, 32, 44, 156, 234, 238, 386, 394, 588, 604, 686, 692, 712, or 800, or to a reference sequence corresponding to SEQ ID NO: 2, 4, 32, 44, 156, 234, 238, 386, 394, 588, 604, 686, 692, 712, or 800, wherein the amino acid sequence comprises one or more substitutions relative to the reference sequence corresponding to residues 8 to 890 of SEQ ID NO: 2, 4, 32, 44, 156, 234, 238, 386, 394, 588, 604, 686, 692, 712, or 800, or relative to the reference sequence corresponding to SEQ ID NO: 2, 4, 32, 44, 156, 234, 238, 386, 394, 588, 604, 686, 692, 712, or 800.

2. The engineered RNA polymerase of claim 1, comprising an amino acid sequence having at least 70%, 75%, 80%, 81%, 82%, 83%, 84%, 85%, 86%, 87%, 88%, 89%, 90%, 91%, 92%, 93%, 94%, 95%, 96%, 97%, 98%, 99%, or more sequence identity to the reference sequence corresponding to residues 8 to 890 of SEQ ID NO: 2, or to the reference sequence corresponding to SEQ ID NO: 2, wherein the amino acid sequence comprises one or more substitutions relative to the reference sequence corresponding to residues 8 to 890 of SEQ ID NO: 2, or relative to the reference sequence corresponding to SEQ ID NO: 2.

3. The engineered RNA polymerase of claim 1, comprising an amino acid sequence having at least 70%, 75%, 80%, 81%, 82%, 83%, 84%, 85%, 86%, 87%, 88%, 89%, 90%, 91%, 92%, 93%, 94%, 95%, 96%, 97%, 98%, 99%, or more sequence identity to the reference sequence corresponding to residues 8 to 890 of SEQ ID NO: 4, 32, 44, 156, 234, 238, 386, 394, 588, 604, 686, 692, 712, or 800, or to the reference sequence corresponding to SEQ ID NO: 4, 32, 44, 156, 234, 238, 386, 394, 588, 604, 686, 692, 712, or 800, wherein the amino acid sequence comprises one or more substitutions relative to the reference sequence corresponding to residues 8 to 890 of SEQ ID NO: 2, or relative to the reference sequence corresponding to SEQ ID NO: 2.

4. The engineered RNA polymerase of claim 1, comprising an amino acid sequence having at least 70%, 75%, 80%, 81%, 82%, 83%, 84%, 85%, 86%, 87%, 88%, 89%, 90%, 91%, 92%, 93%, 94%, 95%, 96%, 97%, 98%, 99% or more sequence identity to a reference sequence corresponding to residues 8 to 890 of an even numbered SEQ ID NO. of SEQ ID NOs: 4-828, or to a reference sequence corresponding to an even numbered SEQ ID NO. of SEQ ID NOs: 4-828, wherein the amino acid sequence comprises one or more substitutions relative to the reference sequence corresponding to residues 8 to 890 of SEQ ID NO: 2, or relative to the reference sequence corresponding to SEQ ID NO: 2.

5. The engineered RNA polymerase of claim 1, wherein the amino acid sequence of the engineered RNA polymerase comprises at least a substitution at amino acid position 13, 14, 15, 17, 19, 21, 32, 33, 38, 45, 52, 54, 55, 56, 56, 57, 60, 61, 62, 63, 67, 69, 72, 75, 78, 81, 82, 83, 84, 89, 93, 95, 100, 105, 111, 115, 122, 124, 127, 131, 133, 135, 137, 138, 139, 140, 141, 143, 150, 160, 161, 162, 164, 166, 168, 169, 170, 171, 172, 173, 179, 185, 187, 193, 196, 207, 212, 217, 218, 221, 227, 237, 239, 240, 245, 246, 250, 253, 254, 257, 261, 272, 274, 275, 311, 336, 340, 342, 351, 357, 367, 375, 379, 382, 388, 391, 392, 394, 397, 401, 402, 403, 404, 419, 424, 437, 440, 494, 510, 514, 517, 527, 529, 530, 531, 533, 536, 589, 594, 598, 607, 609, 615, 616, 617, 625, 629, 648, 650, 655, 659, 660, 663, 664, 666, 670, 672, 690, 693, 696, 718, 720, 721, 749, 759, 763, 773, 775, 779, 782, 782, 810, 854, 857, 867, 875, or 878, or combinations thereof, wherein the amino acid positions are relative to the reference sequence corresponding to residues 8 to 890 of SEQ ID NO: 2, or relative to the reference sequence corresponding to SEQ ID NO: 2.

6. The engineered RNA polymerase claim 5, wherein the amino acid sequence of the engineered RNA polymerase comprises at least a substitution or an amino acid residue 13N, 14Q/Y, 15T, 17N, 19E, 21G, 32S/T/V, 33E, 38G, 45K, 52T, 54H, 55D/S/W, 56E/G/N/T/V, 57G, 60G/L/M/R, 61W/Y, 62T, 63S, 67R, 69S, 72R, 75S/Y, 78S, 81C/L, 82S, 83K, 84A, 89Q, 93Y, 95Y, 100R, 105R, 111K, 115L/V, 122I, 124F, 127G, 131T, 133C, 135G/K, 137G, 138R, 139R, 140R, 141A, 143N/Q/R/V, 150Q/Y, 160F/L, 161R, 162V, 164W, 166D/R/T/V, 168K/L/R/S/T/V/W, 169G/L, 170L/Q/R/S, 171E/F/L/Y, 172A/E/G/K/R/V, 173D/H/L/Y, 179N, 185I/L/P, 187G/H/L, 193G, 196A/C/G/S/V, 207S, 212R/Y, 217P/V, 218Q/T, 221C, 227V, 237L, 239L/R, 240M, 245C, 246K/R/V, 250R, 253Y, 254G/S, 257L/V, 261M, 272N, 274G/L, 275A/Y, 311G, 336L/M/S/V, 340E/W, L342Q, 351L, 357E/P, 367F/P/T, 375F/P, 379A/S, 382G/L/R, 388K/R, 391F/S, 392A/M/R, 394K, 397S, 401R, 402T, 403V, 404I/L/S/Y, 419R/S, 424A, 437P, 440K, 494G, 510V, 514I/S, 517R, 527E, 529R, 530N, 531Q, 533S, 536E/V, 589C, 594G, 598A/K/L/R/V, 607Y, 609C/E/F/P/W, 615A, 616A, 617R, 625C, 629D/K/R, 648F, 650M, 655M/R, 659R, 660H/W/Y, 663L, 664K/P, 666M, 670Q/R, 672G/P/R/S/T, 690S, 693R, 696L, 718F/N/S/V/Y, 720A/G/I/P/S, 721A/E/M/S/T/Y, 749R, 759M, 763S, 773A, 775K/R, H779R, 782R/V, 810K, 854T, 857V, 867Q, 875C, or 878M, or combinations thereof, wherein the amino acid positions are relative to the reference sequence corresponding to residues 8 to 890 of SEQ ID NO: 2, or relative to the reference sequence corresponding to SEQ ID NO: 2.

7. The engineered RNA polymerase of claim 1, wherein the amino acid sequence of the engineered RNA polymerase comprises at least a substitution at amino acid position 32, 38, 56, 138, 150, 170, 171, 173, 246, 311, 336, 340, 357, 388, 394, 401, 404, 437, 514, 536, 609, 629, 659, 660, 664, 779, or 782, or combinations thereof, wherein the amino acid positions are relative to the reference sequence corresponding to residues 8 to 890 of SEQ ID NO: 2, or relative to the reference sequence corresponding to SEQ ID NO: 2.

8. (canceled)

9. (canceled)

10. (canceled)

11. (canceled)

12. (canceled)

13. The engineered RNA polymerase of claim 1, comprising an amino acid sequence having at least 70%, 75%, 80%, 81%, 82%, 83%, 84%, 85%, 86%, 87%, 88%, 89%, 90%, 91%, 92%, 93%, 94%, 95%, 96%, 97%, 98%, 99%, or more sequence identity to the reference sequence corresponding to residues 8 to 890 of SEQ ID NO: 4, 32, 44, 156, 234, 238, 386, 394, 588, 604, 686, 692, 712, or 800, or to the reference sequence corresponding to SEQ ID NO: 4, 32, 44, 156, 234, 238, 386, 394, 588, 604, 686, 692, 712, or 800.

14. (canceled)

15. The engineered RNA polymerase of claim 1, comprising an amino acid sequence having at least 70%, 75%, 80%, 81%, 82%, 83%, 84%, 85%, 86%, 87%, 88%, 89%, 90%, 91%, 92%, 93%, 94%, 95%, 96%, 97%, 98%, 99%, or more sequence identity to the reference sequence corresponding to residues 8 to 890 of SEQ ID NO: 4, 32, 44, 156, 234, 238, 386, 394, 588, 604, 686, 692, 712, or 800, or to the reference sequence corresponding to SEQ ID NO: 4, 32, 44, 156, 234, 238, 386, 394, 588, 604, 686, 692, 712, or 800, wherein the amino acid sequence comprises one or more substitutions relative to the reference sequence corresponding to residues 8 to 890 of SEQ ID NO: 4, 32, 44, 156, 234, 238, 386, 394, 588, 604, 686, 692, 712, or 800, or relative to the reference sequence corresponding to SEQ ID NO: 4, 32, 44, 156, 234, 238, 386, 394, 588, 604, 686, 692, 712, or 800.

16. The engineered RNA polymerase of claim 1, comprising an amino acid sequence having at least 70%, 75%, 80%, 81%, 82%, 83%, 84%, 85%, 86%, 87%, 88%, 89%, 90%, 91%, 92%, 93%, 94%, 95%, 96%, 97%, 98%, 99%, or more sequence identity to the reference sequence corresponding to residues 8 to 890 of an even-numbered SEQ ID NO. of SEQ ID NOs: 4-828, or to the reference sequence corresponding to an even-numbered SEQ ID NO. of SEQ ID NOs: 4-828, wherein the amino acid sequence comprises one or more substitutions relative to the reference sequence corresponding to residues 8 to 890 of SEQ ID NO: 4, 32, 44, 156, 234, 238, 386, 394, 588, 604, 686, 692, 712, or 800, or relative to the reference sequence corresponding to SEQ ID NO: 4, 32, 44, 156, 234, 238, 386, 394, 588, 604, 686, 692, 712, or 800.

17. The engineered RNA polymerase of claim 16, wherein the amino acid sequence of the engineered RNA polymerase comprises at least a substitution at amino acid position 13, 14, 15, 17, 19, 21, 32, 33, 38, 45, 52, 54, 55, 56, 56, 57, 60, 61, 62, 63, 67, 69, 72, 75, 78, 81, 82, 83, 84, 89, 93, 95, 100, 105, 111, 115, 122, 124, 127, 131, 133, 135, 137, 138, 139, 140, 141, 143, 150, 160, 161, 162, 164, 166, 168, 169, 170, 171, 172, 173, 179, 185, 187, 193, 196, 207, 212, 217, 218, 221, 227, 237, 239, 240, 245, 246, 250, 253, 254, 257, 261, 272, 274, 275, 311, 336, 340, 342, 351, 357, 367, 375, 379, 382, 388, 391, 392, 394, 397, 401, 402, 403, 404, 419, 424, 437, 440, 494, 510, 514, 517, 527, 529, 530, 531, 533, 536, 589, 594, 598, 607, 609, 615, 616, 617, 625, 629, 648, 650, 655, 659, 660, 663, 664, 666, 670, 672, 690, 693, 696, 718, 720, 721, 749, 759, 763, 773, 775, 779, 782, 782, 810, 854, 857, 867, 875, or 878 or combinations thereof, wherein the amino acid positions are relative to the reference sequence corresponding to residues 8 to 890 of SEQ ID NO: 4, 32, 44, 156, 234, 238, 386, 394, 588, 604, 686, 692, 712, or 800, or relative to the reference sequence corresponding to SEQ ID NO: 4, 32, 44, 156, 234, 238, 386, 394, 588, 604, 686, 692, 712, or 800.

18. The engineered RNA polymerase of claim 15, wherein the amino acid sequence of the engineered RNA polymerase comprises at least a substitution or an amino acid residue 13N, 14Q/Y, 15T, 17N, 19E, 21G, 32S/TV, 33E, 38G/R, 45K, 52T, 54H, 55D/S/W, 56A/E/G/N/T/V, 57G, 60G/L/M/R, 61W/Y, 62T, 63S, 67R, 69S, 72R, 75S/Y, 78S, 81C/L, 82S, 83K, 84A, 89Q, 93Y, 95Y, 100R, 105R, 111K, 115L/V, 122I, 124F, 127G, 131T, 133C, 135G/K, 137G, 138N/R, 139R, 140R, 141A, 143N/Q/R/V, 150Q/Y, 160F/L, 161R, 162V, 164W, 166D/R/T/V, 168K/L/R/S/T/V/W, 169G/L, 170L/Q/R/S, 171E/F/L/Y, 172A/E/G/K/R/V, 173D/H/L/Y/V, 179N, 185I/L/P, 187G/H/L, 193G, 196A/C/G/S/V, 207S, 212R/Y, 217P/V, 218Q/T, 221C, 227V, 237L, 239L/R, 240M, 245C, 246K/RN, 250R, 253Y, 254G/S, 257L/V, 261M, 272N, 274G/L, 275A/Y, 311A/G, 336K/L/M/S/V, 340E/K/W, 342Q, 351L, 357E/P, 367F/P/T, 375F/P, 379A/S, 382G/L/R, 388A/K/R, 391F/S, 392A/M/R, 394K, 397S, 401R, 402T, 403V, 404I/L/S/Y, 419R/S, 424A, 437P/S, 440K, 494G, 510V, 514I/L/S, 517R, 527E, 529R, 530N, 531Q, 533S, 536E/V, 589C, 594G, 598A/K/L/R/V, 607Y, 609C/E/F/P/W, 615A, 616A, 617R, 625C, 629A/D/K/R, 648F, 650M, 655M/R, 659E/R, 660H/W/Y, 663L, 664K/P, 666M, 670Q/R, 672G/P/R/S/T, 690S, 693R, 696L, 718F/N/S/V/Y, 720A/G/I/P/S, 721A/E/M/S/T/Y, 749R, 759M, 763S, 773A, 775K/R, 779R, 782E/R, 782V, 810K, 854T, 857V, 867Q, 875C, or 878M, or combinations thereof, wherein the amino acid positions are relative to the reference sequence corresponding to residues 8 to 890 of SEQ ID NO: 4, 32, 44, 156, 234, 238, 386, 394, 588, 604, 686, 692, 712, or 800, or relative to the reference sequence corresponding to SEQ ID NO:
4, 32, 44, 156, 234, 238, 386, 394, 588, 604, 686, 692, 712, or 800.

19. The engineered RNA polymerase of claim 15, wherein the amino acid sequence of the engineered RNA polymerase comprises at least a substitution at amino acid position 32, 38, 56, 138, 150, 170, 171, 173, 246, 311, 336, 340, 357, 388, 394, 401, 404, 437, 514, 536, 609, 629, 659, 660, 664, 779, or 782, or combinations thereof, wherein the amino acid positions are relative to the reference sequence corresponding to residues 8 to 890 of SEQ ID NO: 4, 32, 44, 156, 234, 238, 386, 394, 588, 604, 686, 692, 712, or 800, or relative to the reference sequence corresponding to SEQ ID NO: 4, 32, 44, 156, 234, 238, 386, 394, 588, 604, 686, 692, 712, or 800.

20. (canceled)

21. The engineered RNA polymerase of claim 15, comprising an amino acid sequence having at least 70%, 75%, 80%, 81%, 82%, 83%, 84%, 85%, 86%, 87%, 88%, 89%, 90%, 91%, 92%, 93%, 94%, 95%, 96%, 97%, 98%, 99%, or more sequence identity to the reference sequence corresponding to residues 8 to 890 of SEQ ID NO: 4, or to the reference sequence corresponding to SEQ ID NO: 4, wherein the amino acid sequence comprises one or more substitutions relative to the reference sequence corresponding to residues 8 to 890 of SEQ ID NO: 4, or relative to the reference sequence corresponding to SEQ ID NO: 4.

22. The engineered RNA polymerase of claim 21, wherein the amino acid sequence of the engineered RNA polymerase comprises at least a substitution or substitution set at amino acid position(s) 311/388/404/440, 138/340, 138/311/336/340/388, 311/388/440, 138/311/340/388/404/440, 138/336/342, or 351/388, wherein the amino acid positions are relative to the reference sequence corresponding to residues 8 to 890 of SEQ ID NO: 4, or relative to the reference sequence corresponding to SEQ ID NO: 4.

23. (canceled)

24. The engineered RNA polymerase of claim 15, comprising an amino acid sequence having at least 70%, 75%, 80%, 81%, 82%, 83%, 84%, 85%, 86%, 87%, 88%, 89%, 90%, 91%, 92%, 93%, 94%, 95%, 96%, 97%, 98%, 99%, or more sequence identity to the reference sequence corresponding to residues 8 to 890 of SEQ ID NO: 32, or to the reference sequence corresponding to SEQ ID NO: 32, wherein the amino acid sequence comprises one or more substitutions relative to the reference sequence corresponding to residues 8 to 890 of SEQ ID NO: 32, or relative to the reference sequence corresponding to SEQ ID NO: 32.

25. The engineered RNA polymerase of claim 24, wherein the amino acid sequence of the engineered RNA polymerase comprises at least a substitution or substitution set at amino acid position(s) 514, 38/514, 38/394/514, 38/394/514/664, 394/514/875, 394/514, 38/124/394/514, 171/878, 170, 173, 172, 170/629, 171, 168, 166, 166/272/274/275, 169, 207, 168/217/218, 171/530, 382, 773, 670, 379, 392, 419, 57, 164, 810, 659, 54, 172/173/514/659/660, 170/171/172/514/659, 173/514/659/660, 173/514/659/810, 170/340/514/659/660/810, 170/171/173/336/340/514/659/660, 57/171/173/514/659/660/810, 170/173/514/659/660/810, 57/171/172/336/340/514/659, 173/514, 171/172/173/514/659/660, 57/170/171/173/514/659/660/810, 57/173/514, 172/173/514/857, 57/173/340/514, 170/171/173/336/514, 171/514, 57/170/173/336/514, 170/336, 173/514/659, 57/514, or 173/810, wherein the amino acid positions are relative to the reference sequence corresponding to residues 8 to 890 of SEQ ID NO: 32, or relative to the reference sequence corresponding to SEQ ID NO: 32.

26. (canceled)

27. The engineered RNA polymerase of claim 15, comprising an amino acid sequence having at least 70%, 75%, 80%, 81%, 82%, 83%, 84%, 85%, 86%, 87%, 88%, 89%, 90%, 91%, 92%, 93%, 94%, 95%, 96%, 97%, 98%, 99%, or more sequence identity to the reference sequence corresponding to residues 8 to 890 of SEQ ID NO: 44, or to the reference sequence corresponding to SEQ ID NO: 44, wherein the amino acid sequence comprises one or more substitutions relative to the reference sequence corresponding to residues 8 to 890 of SEQ ID NO: 44, or relative to the reference sequence corresponding to SEQ ID NO: 44.

28. The engineered RNA polymerase of claim 27, wherein the amino acid sequence of the engineered RNA polymerase comprises at least a substitution or substitution set at amino acid position(s) 336, 143/336/340/782, or 143/336/340/357/514, wherein the amino acid positions are relative to the reference sequence corresponding to residues 8 to 890 of SEQ ID NO: 44, or relative to the reference sequence corresponding to SEQ ID NO: 44.

29. (canceled)

30. The engineered RNA polymerase of claim 15, comprising an amino acid sequence having at least 70%, 75%, 80%, 81%, 82%, 83%, 84%, 85%, 86%, 87%, 88%, 89%, 90%, 91%, 92%, 93%, 94%, 95%, 96%, 97%, 98%, 99%, or more sequence identity to the reference sequence corresponding to residues 8 to 890 of SEQ ID NO: 156, or to the reference sequence corresponding to SEQ ID NO: 156, wherein the amino acid sequence comprises one or more substitutions relative to the reference sequence corresponding to residues 8 to 890 of SEQ ID NO: 156, or relative to the reference sequence corresponding to SEQ ID NO: 156.

31. The engineered RNA polymerase of claim 30, wherein the amino acid sequence of the engineered RNA polymerase comprises at least a substitution or substitution set at amino acid position(s) 207, 419, 207/336/340, 166/169, 207/670, 166/336/340, 207/419/670, 207/336/340/382/419/670, 207/382, 670, 336/670, 340/670, 382, 127/141/207/336/382/670, 207/336/382/419/670, 419/670, 166/168/207/336/340/419/670, 166/340, or 207/336/340/670, wherein the amino acid positions are relative to the reference sequence corresponding to residues 8 to 890 of SEQ ID NO: 156, or relative to the reference sequence corresponding to SEQ ID NO: 156.

32. (canceled)

33. The engineered RNA polymerase of claim 30, wherein the amino acid sequence of the engineered RNA polymerase comprises at least a substitution or substitution set at amino acid position(s) 38/437/779, 38/437, 38, 38/207/437/779, 517/779, 38/437/527/664, 38/207/379/437, 664/670/779, 38/779, 38/437/517, 437/779, 38/437/607, 38/379/779, or 517/670/779, wherein the amino acid positions are relative to the reference sequence corresponding to SEQ ID NO: 156.

34. (canceled)

35. The engineered RNA polymerase of claim 30, wherein the amino acid sequence of the engineered RNA polymerase comprises at least a substitution set at amino acid positions 357/394/664 or 138/311/336/340/357/388/394/404/664, wherein the amino acid positions are relative to the reference sequence corresponding to residues 8 to 890 of SEQ ID NO: 156, or relative to the reference sequence corresponding to SEQ ID NO: 156.

36. (canceled)

37. The engineered RNA polymerase of claim 15, comprising an amino acid sequence having at least 70%, 75%, 80%, 81%, 82%, 83%, 84%, 85%, 86%, 87%, 88%, 89%, 90%, 91%, 92%, 93%, 94%, 95%, 96%, 97%, 98%, 99%, or more sequence identity to the reference sequence corresponding to residues 8 to 890 of SEQ ID NO: 234, or to the reference sequence corresponding to SEQ ID NO: 234, wherein the amino acid sequence comprises one or more substitutions relative to the reference sequence corresponding to residues 8 to 890 of SEQ ID NO: 234, or relative to the reference sequence corresponding to SEQ ID NO: 234.

38. The engineered RNA polymerase of claim 37, wherein the amino acid sequence of the engineered RNA polymerase comprises at least a substitution or substitution set at amino acid position(s) 720, 196, 609, 246, 185, 594, 212, 494, 375, 721, 72, 867, 160, 718, 187, 170/173, 615, 137/138, 854, 131, 38/185/187/437, 185/187, 437/609, 38/609, 38/185/187/437/609, 437/609/720, 185/187/609, 185/187/437, 437/721, 609/720, 185/187/246, or 185/187/437/609/720, wherein the amino acid positions are relative to the reference sequence corresponding to residues 8 to 890 of SEQ ID NO: 234, or relative to the reference sequence corresponding to SEQ ID NO: 234.

39. (canceled)

40. The engineered RNA polymerase of claim 15, comprising an amino acid sequence having at least 70%, 75%, 80%, 81%, 82%, 83%, 84%, 85%, 86%, 87%, 88%, 89%, 90%, 91%, 92%, 93%, 94%, 95%, 96%, 97%, 98%, 99%, or more sequence identity to the reference sequence corresponding to residues 8 to 890 of SEQ ID NO: 386, or to the reference sequence corresponding to SEQ ID NO: 386, wherein the amino acid sequence comprises one or more substitutions relative to the reference sequence corresponding to residues 8 to 890 of SEQ ID NO: 386, or relative to the reference sequence corresponding to SEQ ID NO: 386.

41. The engineered RNA polymerase of claim 40, wherein the amino acid sequence of the engineered RNA polymerase comprises at least a substitution or substitution set at amino acid position(s) 170/609, 38/185/187/609, 38/185/187, 38/170/173, 38/173/185/187/720, 170/185/187/609, 609, 170/185/187/609/721, 38/609, 38/170/246/609, 185/187/609/718, 38/185/187/609/718/720, 38/170/246/609/718, 720, 246/609, 38/185/187/246/720, 38/609/721, 38/721, 38/720/721, 38/170/609/718/720, 38/718, 38/185/187/609/718/721, 529/609, 38/609/718, 185/187/609/718/720, 185/187/609/718/721, 38/170/718/720/721, 170/185/187/718/720, 38/173/185/187/246/609/720, 609/718/720, 170/185/187/718/720/721, 38/170/173/246/609/718, 246/721, 38/718/720, or 38/609/718/720, wherein the amino acid positions are relative to the reference sequence corresponding to residues 8 to 890 of SEQ ID NO: 386, or relative to the reference sequence corresponding to SEQ ID NO: 386.

42. (canceled)

43. The engineered RNA polymerase of claim 15, comprising an amino acid sequence having at least 70%, 75%, 80%, 81%, 82%, 83%, 84%, 85%, 86%, 87%, 88%, 89%, 90%, 91%, 92%, 93%, 94%, 95%, 96%, 97%, 98%, 99%, or more sequence identity to the reference sequence corresponding to residues 8 to 890 of SEQ ID NO: 238, or to the reference sequence corresponding to SEQ ID NO: 238, wherein the amino acid sequence comprises one or more substitutions relative to the reference sequence corresponding to residues 8 to 890 of SEQ ID NO: 238, or relative to the reference sequence corresponding to SEQ ID NO: 238.

44. The engineered RNA polymerase of claim 43, wherein the amino acid sequence of the engineered RNA polymerase comprises at least a substitution or substitution set at amino acid position(s) 143, 105, 775/779, 135, 100, 246, 779/782, 749, 237, 162, 83, 218, 227, 115, 274, 81, 122, 61, 32, 139, 75, 239, 257, 240, 69/161, 253, 14, 221, 84, 133/150, 60, 275, 89, 15, 254, 625, 14/67, 21, 93, 250, 217, 19, 95, 759, 62, or 140, wherein the amino acid positions are relative to the reference sequence corresponding to residues 8 to 890 of SEQ ID NO: 238, or relative to the reference sequence corresponding to SEQ ID NO: 238.

45. (canceled)

46. The engineered RNA polymerase of claim 15, comprising an amino acid sequence having at least 70%, 75%, 80%, 81%, 82%, 83%, 84%, 85%, 86%, 87%, 88%, 89%, 90%, 91%, 92%, 93%, 94%, 95%, 96%, 97%, 98%, 99%, or more sequence identity to the reference sequence corresponding to residues 8 to 890 of SEQ ID NO: 394, or to the reference sequence corresponding to SEQ ID NO: 394, wherein the amino acid sequence comprises one or more substitutions relative to the reference sequence corresponding to residues 8 to 890 of SEQ ID NO: 394, or relative to the reference sequence corresponding to SEQ ID NO: 394.

47. The engineered RNA polymerase of claim 46, wherein the amino acid sequence of the engineered RNA polymerase comprises at least a substitution or substitution set at amino acid position(s) 609/779, 246/609, 246, 609/775/779, 105, 143/609/775, 105/135/609/775, or 111/609, 609, wherein the amino acid positions are relative to the reference sequence corresponding to residues 8 to 890 of SEQ ID NO: 394, or relative to the reference sequence corresponding to SEQ ID NO: 394.

48. (canceled)

49. The engineered RNA polymerase of claim 15, comprising an amino acid sequence having at least 70%, 75%, 80%, 81%, 82%, 83%, 84%, 85%, 86%, 87%, 88%, 89%, 90%, 91%, 92%, 93%, 94%, 95%, 96%, 97%, 98%, 99%, or more sequence identity to the reference sequence corresponding to residues 8 to 890 of SEQ ID NO: 588, or to the reference sequence corresponding to SEQ ID NO: 588, wherein the amino acid sequence comprises one or more substitutions relative to the reference sequence corresponding to residues 8 to 890 of SEQ ID NO: 588, or relative to the reference sequence corresponding to SEQ ID NO: 588.

50. The engineered RNA polymerase of claim 49, wherein the amino acid sequence of the engineered RNA polymerase comprises at least a substitution or substitution set at amino acid position(s) 32, 531/533, 115, 83, 32/60/61, 55, 589, 357, 617, 172, 598, 56/193, 56, 536, 52, 17, 261, 78, 629, 63, 82, 207, 666, 150, 45, 135, 13, 33, or 245, wherein the amino acid positions are relative to the reference sequence corresponding to residues 8 to 890 of SEQ ID NO: 588, or relative to the reference sequence corresponding to SEQ ID NO: 588.

51. (canceled)

52. The engineered RNA polymerase of claim 15, comprising an amino acid sequence having at least 70%, 75%, 80%, 81%, 82%, 83%, 84%, 85%, 86%, 87%, 88%, 89%, 90%, 91%, 92%, 93%, 94%, 95%, 96%, 97%, 98%, 99%, or more sequence identity to the reference sequence corresponding to residues 8 to 890 of SEQ ID NO: 604, or to the reference sequence corresponding to SEQ ID NO: 604, wherein the amino acid sequence comprises one or more substitutions relative to the reference sequence corresponding to residues 8 to 890 of SEQ ID NO: 604, or relative to the reference sequence corresponding to SEQ ID NO: 604.

53. The engineered RNA polymerase of claim 52, wherein the amino acid sequence of the engineered RNA polymerase comprises at least a substitution or substitution set at amino acid position(s) 207/245/629, 17/56/150/598, 56/629, 536, 185, 56/150, 17/56/150/207/245/598/617/629, 56/150/536/598, 56/536, 185/666, 150, or 143/150/246/782, wherein the amino acid positions are relative to the reference sequence corresponding to residues 8 to 890 of SEQ ID NO: 604, or relative to the reference sequence corresponding to SEQ ID NO: 604.

54. (canceled)

55. The engineered RNA polymerase of claim 15, comprising an amino acid sequence having at least 70%, 75%, 80%, 81%, 82%, 83%, 84%, 85%, 86%, 87%, 88%, 89%, 90%, 91%, 92%, 93%, 94%, 95%, 96%, 97%, 98%, 99%, or more sequence identity to the reference sequence corresponding to residues 8 to 890 of SEQ ID NO: 686, or to the reference sequence corresponding to SEQ ID NO: 686, wherein the amino acid sequence comprises one or more substitutions relative to the reference sequence corresponding to residues 8 to 890 of SEQ ID NO: 686, or relative to the reference sequence corresponding to SEQ ID NO: 686.

56. The engineered RNA polymerase of claim 55, wherein the amino acid sequence of the engineered RNA polymerase comprises at least a substitution or substitution set at amino acid position(s) 143, 246/424/648/782, 246/659/782, 56/150/629/660/782, 721/782, 782, 196/659/782, or 720/721/782, wherein the amino acid positions are relative to the reference sequence corresponding to residues 8 to 890 of SEQ ID NO: 686, or relative to the reference sequence corresponding to SEQ ID NO: 686.

57. (canceled)

58. The engineered RNA polymerase of claim 15, comprising an amino acid sequence having at least 70%, 75%, 80%, 81%, 82%, 83%, 84%, 85%, 86%, 87%, 88%, 89%, 90%, 91%, 92%, 93%, 94%, 95%, 96%, 97%, 98%, 99%, or more sequence identity to the reference sequence corresponding to residues 8 to 890 of SEQ ID NO: 692, or to the reference sequence corresponding to SEQ ID NO: 692, wherein the amino acid sequence comprises one or more substitutions relative to the reference sequence corresponding to residues 8 to 890 of SEQ ID NO: 692, or relative to the reference sequence corresponding to SEQ ID NO: 692.

59. The engineered RNA polymerase of claim 58, wherein the amino acid sequence of the engineered RNA polymerase comprises at least a substitution or substitution set at amino acid position(s) 143/659/782, 166/171/246/311, 143/721, 782, or 143/171/659/782, wherein the amino acid positions are relative to the reference sequence corresponding to residues 8 to 890 of SEQ ID NO: 692, or relative to the reference sequence corresponding to SEQ ID NO: 692.

60. (canceled)

61. The engineered RNA polymerase of claim 15, comprising an amino acid sequence having at least 70%, 75%, 80%, 81%, 82%, 83%, 84%, 85%, 86%, 87%, 88%, 89%, 90%, 91%, 92%, 93%, 94%, 95%, 96%, 97%, 98%, 99%, or more sequence identity to the reference sequence corresponding to residues 8 to 890 of SEQ ID NO: 712, or to the reference sequence corresponding to SEQ ID NO: 712, wherein the amino acid sequence comprises one or more substitutions relative to the reference sequence corresponding to residues 8 to 890 of SEQ ID NO: 712, or relative to the reference sequence corresponding to SEQ ID NO: 712.

62. The engineered RNA polymerase of claim 61, wherein the amino acid sequence of the engineered RNA polymerase comprises at least a substitution or substitution set at amino acid position(s) 367, 382, 670, 672, 357, 388, 693, 397, 375, 137/382/782, 655, 137/382/392, 391, 137/655/721/763, 696, 663, 137/382, 137/382/392/650/655/782, 137/382/629/660/672, 616, 690, 179, 137, 357/382/670, 388/670/672, 357/375, 357/672, 629, or 655/670, wherein the amino acid positions are relative to the reference sequence corresponding to residues 8 to 890 of SEQ ID NO: 712, or relative to the reference sequence corresponding to SEQ ID NO: 712.

63. (canceled)

64. The engineered RNA polymerase of claim 15, comprising an amino acid sequence having at least 70%, 75%, 80%, 81%, 82%, 83%, 84%, 85%, 86%, 87%, 88%, 89%, 90%, 91%, 92%, 93%, 94%, 95%, 96%, 97%, 98%, 99%, or more sequence identity to the reference sequence corresponding to residues 8 to 890 of SEQ ID NO: 800, or to the reference sequence corresponding to SEQ ID NO: 800, wherein the amino acid sequence comprises one or more substitutions relative to the reference sequence corresponding to residues 8 to 890 of SEQ ID NO: 800, or relative to the reference sequence corresponding to SEQ ID NO: 800.

65. The engineered RNA polymerase of claim 64, wherein the amino acid sequence of the engineered RNA polymerase comprises at least a substitution or substitution set at amino acid position(s) 137, 56/311/382, 56/137/143/721, 137/392, 56/137/392, 56/137/143/404/720, 56/143/246, 56/392, 392/404, 392, 56/137, or 56/196/392, wherein the amino acid positions are relative to the reference sequence corresponding to residues 8 to 890 of SEQ ID NO: 800, or relative to the reference sequence corresponding to SEQ ID NO: 800.

66. (canceled)

67. (canceled)

68. (canceled)

69. (canceled)

70. The engineered RNA polymerase of claim 1, wherein the amino acid sequence of the engineered RNA polymerase comprises residues 8 to 890 of an even numbered SEQ ID NO. of SEQ ID NOs: 4-828, or comprises an even numbered SEQ ID NO. of SEQ ID NOs: 4-828, optionally wherein the amino acid sequence has 1, 2, 3, 4, 5, 6, 7, 8, 9, or up to 10 substitutions.

71. (canceled)

72. (canceled)

73. The engineered RNA polymerase of claim 1, wherein the engineered RNA polymerase exhibits an improved property compared to a reference RNA polymerase, wherein the improved property is-selected from i) increased activity, ii) increased thermostability, iii) increased processivity, and iv) increased RNA product integrity, or any combination of i), ii), iii) and iv), and wherein the reference RNA polymerase has the sequence corresponding to residues 8 to 890 of SEQ ID NO: 2, 4, 32, 44, 156, 234, 238, 386, 394, 588, 604, 686, 692, 712, or 800, or the sequence corresponding to SEQ ID NO: 2, 4, 32, 44, 156, 234, 238, 386, 394, 588, 604, 686, 692, 712, or 800.

74. (canceled)

75. (canceled)

76. A recombinant polynucleotide encoding an engineered RNA polymerase of claim 1.

77. (canceled)

78. (canceled)

79. (canceled)

80. (canceled)

81. (canceled)

82. An expression vector comprising at least one recombinant polynucleotide of claim 76.

83. (canceled)

84. (canceled)

85. A host cell comprising an expression vector of claim 82.

86. (canceled)

87. A method of producing an engineered RNA polymerase polypeptide in a host cell comprising culturing a host cell of claim 85, under suitable culture conditions, such that at least one engineered RNA polymerase is produced.

88. (canceled)

89. (canceled)

90. (canceled)

91. (canceled)

92. (canceled)

93. (canceled)

94. (canceled)

95. (canceled)

96. A method of producing RNA in vitro, comprising contacting a target DNA template with an engineered RNA polymerase of claim 1 in presence of one or more nucleotide triphosphates under conditions suitable for transcription of the DNA template.

97. (canceled)

98. (canceled)

99. (canceled)

100. (canceled)

101. A kit comprising an engineered RNA polymerase of claim 1.

102. (canceled)
